United States Patent Application Publication US 2007/0048756 A1 - sequence listing, part 30

SEQ ID NO: 1053479 - DNA, 33 bp, Homo sapien
aagcataaatcgatcaagtttattaactctatc

SEQ ID NO: 1053480 - DNA, 33 bp, Homo sapien
aagcataaatcgatcaggtttattaactctatc

SEQ ID NO: 1053481 - DNA, 33 bp, Homo sapien
agaatcatgctagaaaccgttaattatgatcca

SEQ ID NO: 1053482 - DNA, 33 bp, Homo sapien
agaatcatgctagaaagcgttaattatgatcca

SEQ ID NO: 1053483 - DNA, 33 bp, Homo sapien
tcataagacaaatataaacctaaatgtttctac

SEQ ID NO: 1053484 - DNA, 33 bp, Homo sapien
tcataagacaaatatacacctaaatgtttctac

SEQ ID NO: 1053485 - DNA, 33 bp, Homo sapien
gtgaatactgctacaacaaatatatgtgctcct

SEQ ID NO: 1053486 - DNA, 33 bp, Homo sapien
gtgaatactgctacaataaatatatgtgctcct

SEQ ID NO: 1053487 - DNA, 33 bp, Homo sapien
agccacattcatctacaaggaaggctgggaaat

SEQ ID NO: 1053488 - DNA, 33 bp, Homo sapien
agccacattcatctactaggaaggctgggaaat

SEQ ID NO: 1053489 - DNA, 33 bp, Homo sapien
cttcaactatgcagataaggatcatgtcttaaa

SEQ ID NO: 1053490 - DNA, 33 bp, Homo sapien
cttcaactatgcagatgaggatcatgtcttaaa

SEQ ID NO: 1053491 - DNA, 33 bp, Homo sapien
ctttaaaattgataaaccaggtcacgatacctc

SEQ ID NO: 1053492 - DNA, 33 bp, Homo sapien
ctttaaaattgataaatcaggtcacgatacctc

SEQ ID NO: 1053493 - DNA, 33 bp, Homo sapien
actcccagtaacatcacgttctggcccaagata

SEQ ID NO: 1053494 - DNA, 33 bp, Homo sapien
actcccagtaacatcatgttctggcccaagata

SEQ ID NO: 1053495 - DNA, 33 bp, Homo sapien
ggctggtgtcttccccaagagtgcctatgatag

SEQ ID NO: 1053496 - DNA, 33 bp, Homo sapien
ggctggtgtcttccccgagagtgcctatgatag

SEQ ID NO: 1053497 - DNA, 33 bp, Homo sapien
tttgaaattctattccaaatcaacttttgaggc

SEQ ID NO: 1053498 - DNA, 33 bp, Homo sapien
tttgaaattctattccgaatcaacttttgaggc

SEQ ID NO: 1053499 - DNA, 33 bp, Homo sapien
aaccagagctgctctaagtcactttcctcattt

SEQ ID NO: 1053500 - DNA, 33 bp, Homo sapien
aaccagagctgctctaggtcactttcctcattt

SEQ ID NO: 1053501 - DNA, 33 bp, Homo sapien
agatatgcttgctttacgttacctgtgctaaga

SEQ ID NO: 1053502 - DNA, 33 bp, Homo sapien
agatatgcttgctttatgttacctgtgctaaga

SEQ ID NO: 1053503 - DNA, 33 bp, Homo sapien
tgtatttctcaagccaatattttttccgcccat

SEQ ID NO: 1053504 - DNA, 33 bp, Homo sapien
tgtatttctcaagccagtattttttccgcccat

SEQ ID NO: 1053505 - DNA, 33 bp, Homo sapien
agtttcatctatctaaatacaaaaggaaactgc

SEQ ID NO: 1053506 - DNA, 33 bp, Homo sapien
agtttcatctatctaagtacaaaaggaaactgc

SEQ ID NO: 1053507 - DNA, 33 bp, Homo sapien
gcagatagggtttgacagtatcaagcacaaaat

SEQ ID NO: 1053508 - DNA, 33 bp, Homo sapien
gcagatagggtttgacggtatcaagcacaaaat

SEQ ID NO: 1053509 - DNA, 33 bp, Homo sapien
ctgatgagtagcaaagcatctattaattagaaa

SEQ ID NO: 1053510 - DNA, 33 bp, Homo sapien
ctgatgagtagcaaagtatctattaattagaaa

SEQ ID NO: 1053511 - DNA, 33 bp, Homo sapien
ataacactgttgttagccattgtcatccagctt

SEQ ID NO: 1053512 - DNA, 33 bp, Homo sapien
ataacactgttgttaggcattgtcatccagctt

SEQ ID NO: 1053513 - DNA, 33 bp, Homo sapien
atgagaacgtcagatcagatatttagtgttaaa

SEQ ID NO: 1053514 - DNA, 33 bp, Homo sapien
atgagaacgtcagatccgatatttagtgttaaa

SEQ ID NO: 1053515 - DNA, 33 bp, Homo sapien
atactatcaaatgtggaaaccatatcattcagc

SEQ ID NO: 1053516 - DNA, 33 bp, Homo sapien
atactatcaaatgtggtaaccatatcattcagc

SEQ ID NO: 1053517 - DNA, 33 bp, Homo sapien
tcaaatatgtacaactaggaagtatgagggaaa

SEQ ID NO: 1053518 - DNA, 33 bp, Homo sapien
tcaaatatgtacaactgggaagtatgagggaaa

SEQ ID NO: 1053519 - DNA, 33 bp, Homo sapien
acctcaaccgcaataaaatgcttagacaatggc

SEQ ID NO: 1053520 - DNA, 33 bp, Homo sapien
acctcaaccgcaataagatgcttagacaatggc

SEQ ID NO: 1053521 - DNA, 33 bp, Homo sapien
gataatcacattagaaagttgctgtttttctac

SEQ ID NO: 1053522 - DNA, 33 bp, Homo sapien
gataatcacattagaatgttgctgtttttctac

SEQ ID NO: 1053523 - DNA, 33 bp, Homo sapien
gtgttgctgagagttaagatctttgtcttctgc

SEQ ID NO: 1053524 - DNA, 33 bp, Homo sapien
gtgttgctgagagttaggatctttgtcttctgc

SEQ ID NO: 1053525 - DNA, 33 bp, Homo sapien
cagatggggaaggagaacgatgcataaacatgg

SEQ ID NO: 1053526 - DNA, 33 bp, Homo sapien
cagatggggaaggagagcgatgcataaacatgg

SEQ ID NO: 1053527 - DNA, 33 bp, Homo sapien
tgttgtagctattcaagtaagttttatgactca

SEQ ID NO: 1053528 - DNA, 33 bp, Homo sapien
tgttgtagctattcaattaagttttatgactca

SEQ ID NO: 1053529 - DNA, 33 bp, Homo sapien
acatacaggatgcagaaacctttcaaaatctct

SEQ ID NO: 1053530 - DNA, 33 bp, Homo sapien
acatacaggatgcagatacctttcaaaatctct

SEQ ID NO: 1053531 - DNA, 33 bp, Homo sapien
ccacttgaacagggaccggaaagcaacagcatg

SEQ ID NO: 1053532 - DNA, 33 bp, Homo sapien
ccacttgaacagggactggaaagcaacagcatg

SEQ ID NO: 1053533 - DNA, 33 bp, Homo sapien
attttgtttctgaatcaaggattggcacattgt

SEQ ID NO: 1053534 - DNA, 33 bp, Homo sapien
attttgtttctgaatccaggattggcacattgt

SEQ ID NO: 1053535 - DNA, 33 bp, Homo sapien
agacatgagacattagacaacatatacgagatg

SEQ ID NO: 1053536 - DNA, 33 bp, Homo sapien
agacatgagacattagtcaacatatacgagatg

SEQ ID NO: 1053537 - DNA, 33 bp, Homo sapien
gtcacatatggtaaaaatgtttctccccatctg

SEQ ID NO: 1053538 - DNA, 33 bp, Homo sapien
gtcacatatggtaaaagtgtttctccccatctg

SEQ ID NO: 1053539 - DNA, 33 bp, Homo sapien
ctacaaaggaagaagcaattgacaataaataac

SEQ ID NO: 1053540 - DNA, 33 bp, Homo sapien
ctacaaaggaagaagcgattgacaataaataac

SEQ ID NO: 1053541 - DNA, 33 bp, Homo sapien
ggcaactagaaccttacagtcgacttgcgtgat

SEQ ID NO: 1053542 - DNA, 33 bp, Homo sapien
ggcaactagaaccttatagtcgacttgcgtgat

SEQ ID NO: 1053543 - DNA, 33 bp, Homo sapien
ttggctcagtaacatacaactttgctactgatt

SEQ ID NO: 1053544 - DNA, 33 bp, Homo sapien
ttggctcagtaacatataactttgctactgatt

SEQ ID NO: 1053545 - DNA, 33 bp, Homo sapien
tggatgattaaaattaaaaagtttgtgcatcca

SEQ ID NO: 1053546 - DNA, 33 bp, Homo sapien
tggatgattaaaattagaaagtttgtgcatcca

SEQ ID NO: 1053547 - DNA, 33 bp, Homo sapien
ttatgagtttcccttgaaggatactgtccccag

SEQ ID NO: 1053548 - DNA, 33 bp, Homo sapien
ttatgagtttcccttgcaggatactgtccccag

SEQ ID NO: 1053549 - DNA, 33 bp, Homo sapien
atttatacttagatgcccagacaggagacattt

SEQ ID NO: 1053550 - DNA, 33 bp, Homo sapien
atttatacttagatgctcagacaggagacattt

SEQ ID NO: 1053551 - DNA, 33 bp, Homo sapien
cagcctcaatcttgtacaaagaaggaggtagac

SEQ ID NO: 1053552 - DNA, 33 bp, Homo sapien
cagcctcaatcttgtataaagaaggaggtagac

SEQ ID NO: 1053553 - DNA, 33 bp, Homo sapien
gcttaaaaggcagaacaaaagtttagaaagcac

SEQ ID NO: 1053554 - DNA, 33 bp, Homo sapien
gcttaaaaggcagaaccaaagtttagaaagcac

SEQ ID NO: 1053555 - DNA, 33 bp, Homo sapien
gttggtgccctatctacaccctcttgctgctat

SEQ ID NO: 1053556 - DNA, 33 bp, Homo sapien
gttggtgccctatctataccctcttgctgctat

SEQ ID NO: 1053557 - DNA, 33 bp, Homo sapien
ggcttttcatttagaacattcagggaggaggca

SEQ ID NO: 1053558 - DNA, 33 bp, Homo sapien
ggcttttcatttagaagattcagggaggaggca

SEQ ID NO: 1053559 - DNA, 33 bp, Homo sapien
acattatttagtgttacgtagacaaacagctat

SEQ ID NO: 1053560 - DNA, 33 bp, Homo sapien
acattatttagtgttatgtagacaaacagctat

SEQ ID NO: 1053561 - DNA, 33 bp, Homo sapien
catttaaagactaatcgataactcaagtggatg

SEQ ID NO: 1053562 - DNA, 33 bp, Homo sapien
catttaaagactaatctataactcaagtggatg

SEQ ID NO: 1053563 - DNA, 33 bp, Homo sapien
cctttgctacatttggaatcagtttcttggctc

SEQ ID NO: 1053564 - DNA, 33 bp, Homo sapien
cctttgctacatttgggatcagtttcttggctc

SEQ ID NO: 1053565 - DNA, 33 bp, Homo sapien
tgatttttgcgattagcatgtaaaatgcccact

SEQ ID NO: 1053566 - DNA, 33 bp, Homo sapien
tgatttttgcgattagtatgtaaaatgcccact

SEQ ID NO: 1053567 - DNA, 33 bp, Homo sapien
cttgatagatgccatagtagagttaggaaagga

SEQ ID NO: 1053568 - DNA, 33 bp, Homo sapien
cttgatagatgccatattagagttaggaaagga

SEQ ID NO: 1053569 - DNA, 33 bp, Homo sapien
tttgggttcacttaagaaatggatgaacttagg

SEQ ID NO: 1053570 - DNA, 33 bp, Homo sapien
tttgggttcacttaagcaatggatgaacttagg

SEQ ID NO: 1053571 - DNA, 33 bp, Homo sapien
gaattattgtcaggaaaaaatgcactgtcctat

SEQ ID NO: 1053572 - DNA, 33 bp, Homo sapien
gaattattgtcaggaagaaatgcactgtcctat

SEQ ID NO: 1053573 - DNA, 33 bp, Homo sapien
cagtgcacatatcatacctatttccagcctgat

SEQ ID NO: 1053574 - DNA, 33 bp, Homo sapien
cagtgcacatatcatatctatttccagcctgat

SEQ ID NO: 1053575 - DNA, 33 bp, Homo sapien
gggcccagctgtgttacgaacagaggcaggatt

SEQ ID NO: 1053576 - DNA, 33 bp, Homo sapien
gggcccagctgtgttatgaacagaggcaggatt

SEQ ID NO: 1053577 - DNA, 33 bp, Homo sapien
tcagccactctaaacactctaatcagaaagttc

SEQ ID NO: 1053578 - DNA, 33 bp, Homo sapien
tcagccactctaaacattctaatcagaaagttc

SEQ ID NO: 1053579 - DNA, 33 bp, Homo sapien
gagttagcctgatgacaccccctttataggctg

SEQ ID NO: 1053580 - DNA, 33 bp, Homo sapien
gagttagcctgatgacgccccctttataggctg

SEQ ID NO: 1053581 - DNA, 33 bp, Homo sapien
aaggtattgtataagagcctctaaacccacagg

SEQ ID NO: 1053582 - DNA, 33 bp, Homo sapien
aaggtattgtataagatcctctaaacccacagg

SEQ ID NO: 1053583 - DNA, 33 bp, Homo sapien
tgagcaaaatgtcttcaatgattttaagctgtg

SEQ ID NO: 1053584 - DNA, 33 bp, Homo sapien
tgagcaaaatgtcttccatgattttaagctgtg

SEQ ID NO: 1053585 - DNA, 33 bp, Homo sapien
aggaatctgggttttcacaagccctcttaagaa

SEQ ID NO: 1053586 - DNA, 33 bp, Homo sapien
aggaatctgggttttcgcaagccctcttaagaa

SEQ ID NO: 1053587 - DNA, 33 bp, Homo sapien
agtattaacctgacaaaattccagaagaggaaa

SEQ ID NO: 1053588 - DNA, 33 bp, Homo sapien
agtattaacctgacaacattccagaagaggaaa

SEQ ID NO: 1053589 - DNA, 33 bp, Homo sapien
aattttatttgcagtaaactttggggttgtcat

SEQ ID NO: 1053590 - DNA, 33 bp, Homo sapien
aattttatttgcagtacactttggggttgtcat

SEQ ID NO: 1053591 - DNA, 33 bp, Homo sapien
ttttcagcacttgaaaggaaggcttatggaatt

SEQ ID NO: 1053592 - DNA, 33 bp, Homo sapien
ttttcagcacttgaaatgaaggcttatggaatt

SEQ ID NO: 1053593 - DNA, 33 bp, Homo sapien
tatttgtctgcatttacatgaattaaaaaatgt

SEQ ID NO: 1053594 - DNA, 33 bp, Homo sapien
tatttgtctgcatttatatgaattaaaaaatgt

SEQ ID NO: 1053595 - DNA, 33 bp, Homo sapien
ctgaaagatacagagggcaatgcagcttagaaa

SEQ ID NO: 1053596 - DNA, 33 bp, Homo sapien
ctgaaagatacagaggtcaatgcagcttagaaa

SEQ ID NO: 1053597 - DNA, 33 bp, Homo sapien
ctcttctgtgcaaaaaactttgagtgatgtacc

SEQ ID NO: 1053598 - DNA, 33 bp, Homo sapien
ctcttctgtgcaaaaacctttgagtgatgtacc

SEQ ID NO: 1053599 - DNA, 33 bp, Homo sapien
aagagactctccaagacactggattggttcagg

SEQ ID NO: 1053600 - DNA, 33 bp, Homo sapien
aagagactctccaagatactggattggttcagg

SEQ ID NO: 1053601 - DNA, 33 bp, Homo sapien
acagacaagtaaactgaaaattcttctatcata

SEQ ID NO: 1053602 - DNA, 33 bp, Homo sapien
acagacaagtaaactgcaaattcttctatcata

SEQ ID NO: 1053603 - DNA, 33 bp, Homo sapien
ccaactgaattcaagccaaaaatatttattcat

SEQ ID NO: 1053604 - DNA, 33 bp, Homo sapien
ccaactgaattcaagcgaaaaatatttattcat

SEQ ID NO: 1053605 - DNA, 33 bp, Homo sapien
tacttcatataagtgcaataatgcggtaattat

SEQ ID NO: 1053606 - DNA, 33 bp, Homo sapien
tacttcatataagtgcgataatgcggtaattat

SEQ ID NO: 1053607 - DNA, 33 bp, Homo sapien
ggtttttatgcagataagggaaaagtttcttcc

SEQ ID NO: 1053608 - DNA, 33 bp, Homo sapien
ggtttttatgcagataggggaaaagtttcttcc

SEQ ID NO: 1053609 - DNA, 33 bp, Homo sapien
atgtatagactactcaaaaagttcactaaaaca

SEQ ID NO: 1053610 - DNA, 33 bp, Homo sapien
atgtatagactactcagaaagttcactaaaaca

SEQ ID NO: 1053611 - DNA, 33 bp, Homo sapien
ggttacaggaccttgaccacttctgaaatttaa

SEQ ID NO: 1053612 - DNA, 33 bp, Homo sapien
ggttacaggaccttgagcacttctgaaatttaa

SEQ ID NO: 1053613 - DNA, 33 bp, Homo sapien
gtcaaaatgctaataacgatatggacagagatg

SEQ ID NO: 1053614 - DNA, 33 bp, Homo sapien
gtcaaaatgctaataatgatatggacagagatg

SEQ ID NO: 1053615 - DNA, 33 bp, Homo sapien
catgaagaacatctaccagggtagtgcagacgg

SEQ ID NO: 1053616 - DNA, 33 bp, Homo sapien
catgaagaacatctactagggtagtgcagacgg

SEQ ID NO: 1053617 - DNA, 33 bp, Homo sapien
gatggagaagcagcagcaggattctgtatgggg

SEQ ID NO: 1053618 - DNA, 33 bp, Homo sapien
gatggagaagcagcagtaggattctgtatgggg

SEQ ID NO: 1053619 - DNA, 33 bp, Homo sapien
ttcatctcaaggaaccacttttttttcatccat

SEQ ID NO: 1053620 - DNA, 33 bp, Homo sapien
ttcatctcaaggaaccgcttttttttcatccat

SEQ ID NO: 1053621 - DNA, 33 bp, Homo sapien
aataataaaaatgtcaagctctgctatacacaa

SEQ ID NO: 1053622 - DNA, 33 bp, Homo sapien
aataataaaaatgtcacgctctgctatacacaa

SEQ ID NO: 1053623 - DNA, 33 bp, Homo sapien
agatggtgggtagttaagctccaaattataaaa

SEQ ID NO: 1053624 - DNA, 33 bp, Homo sapien
agatggtgggtagttaggctccaaattataaaa

SEQ ID NO: 1053625 - DNA, 33 bp, Homo sapien
tctcatgaggacaagccacagaaattcattata

SEQ ID NO: 1053626 - DNA, 33 bp, Homo sapien
tctcatgaggacaagctacagaaattcattata

SEQ ID NO: 1053627 - DNA, 33 bp, Homo sapien
ggtagcaagcacataacgtctttggaaaacaca

SEQ ID NO: 1053628 - DNA, 33 bp, Homo sapien
ggtagcaagcacataatgtctttggaaaacaca

SEQ ID NO: 1053629 - DNA, 33 bp, Homo sapien
agaaactctctgggcaacagtgtaagtccacct

SEQ ID NO: 1053630 - DNA, 33 bp, Homo sapien
agaaactctctgggcagcagtgtaagtccacct

SEQ ID NO: 1053631 - DNA, 33 bp, Homo sapien
ctgcaggttgactgtccaagtatggtacggtat

SEQ ID NO: 1053632 - DNA, 33 bp, Homo sapien
ctgcaggttgactgtctaagtatggtacggtat

SEQ ID NO: 1053633 - DNA, 33 bp, Homo sapien
ggcttgtttgcttcacactctgaataatagcca

SEQ ID NO: 1053634 - DNA, 33 bp, Homo sapien
ggcttgtttgcttcacgctctgaataatagcca

SEQ ID NO: 1053635 - DNA, 33 bp, Homo sapien
tatccacataaagcacaaaaaggaaatatgtgt

SEQ ID NO: 1053636 - DNA, 33 bp, Homo sapien
tatccacataaagcacgaaaaggaaatatgtgt

SEQ ID NO: 1053637 - DNA, 33 bp, Homo sapien
ttcttgctcttaaaagaagttctaaggtagagt

SEQ ID NO: 1053638 - DNA, 33 bp, Homo sapien
ttcttgctcttaaaaggagttctaaggtagagt

SEQ ID NO: 1053639 - DNA, 33 bp, Homo sapien
gccaagtgatctttcaccattttcctgagttcc

SEQ ID NO: 1053640 - DNA, 33 bp, Homo sapien
gccaagtgatctttcatcattttcctgagttcc

SEQ ID NO: 1053641 - DNA, 33 bp, Homo sapien
aagactccagaagagcacattcttgcatagctg

SEQ ID NO: 1053642 - DNA, 33 bp, Homo sapien
aagactccagaagagcgcattcttgcatagctg

SEQ ID NO: 1053643 - DNA, 33 bp, Homo sapien
tctttttcactgtgcaaactggcttggatctgt

SEQ ID NO: 1053644 - DNA, 33 bp, Homo sapien
tctttttcactgtgcatactggcttggatctgt

SEQ ID NO: 1053645 - DNA, 33 bp, Homo sapien
gattctcttattactcaacctttctgctattct

SEQ ID NO: 1053646 - DNA, 33 bp, Homo sapien
gattctcttattactccacctttctgctattct

SEQ ID NO: 1053647 - DNA, 33 bp, Homo sapien
ctgatgaatgtaagaaaacaatgcagtggttct

SEQ ID NO: 1053648 - DNA, 33 bp, Homo sapien
ctgatgaatgtaagaagacaatgcagtggttct

SEQ ID NO: 1053649 - DNA, 33 bp, Homo sapien
ttgaagcaagaatcaactgatctttgtccctcc

SEQ ID NO: 1053650 - DNA, 33 bp, Homo sapien
ttgaagcaagaatcaagtgatctttgtccctcc

SEQ ID NO: 1053651 - DNA, 33 bp, Homo sapien
gctgcagttcattttccaagtcatccttgttgt

SEQ ID NO: 1053652 - DNA, 33 bp, Homo sapien
gctgcagttcattttctaagtcatccttgttgt

SEQ ID NO: 1053653 - DNA, 33 bp, Homo sapien
cttctctttacccttaccaaagtttcacaaagt

SEQ ID NO: 1053654 - DNA, 33 bp, Homo sapien
cttctctttacccttagcaaagtttcacaaagt

SEQ ID NO: 1053655 - DNA, 33 bp, Homo sapien
gaacagatcttcatcaatactttgtgaaacttt

SEQ ID NO: 1053656 - DNA, 33 bp, Homo sapien
gaacagatcttcatcactactttgtgaaacttt

SEQ ID NO: 1053657 - DNA, 33 bp, Homo sapien
accttatctgttacacaggagattataatgata

SEQ ID NO: 1053658 - DNA, 33 bp, Homo sapien
accttatctgttacactggagattataatgata

SEQ ID NO: 1053659 - DNA, 33 bp, Homo sapien
tattttatatttctgacatggcttaatgggcta

SEQ ID NO: 1053660 - DNA, 33 bp, Homo sapien
tattttatatttctgagatggcttaatgggcta

SEQ ID NO: 1053661 - DNA, 33 bp, Homo sapien
tacccaggcttgaaaaatcagggacaacttcac

SEQ ID NO: 1053662 - DNA, 33 bp, Homo sapien
tacccaggcttgaaaactcagggacaacttcac

SEQ ID NO: 1053663 - DNA, 33 bp, Homo sapien
ataagtgtttagatgtaaagcaataactgctac

SEQ ID NO: 1053664 - DNA, 33 bp, Homo sapien
ataagtgtttagatgttaagcaataactgctac

SEQ ID NO: 1053665 - DNA, 33 bp, Homo sapien
gactgaagtcttctcactgaatcatttatgttt

SEQ ID NO: 1053666 - DNA, 33 bp, Homo sapien
gactgaagtcttctcattgaatcatttatgttt

SEQ ID NO: 1053667 - DNA, 33 bp, Homo sapien
ctactgtgacagtacaatatctgcccaaaggaa

SEQ ID NO: 1053668 - DNA, 33 bp, Homo sapien
ctactgtgacagtacactatctgcccaaaggaa

SEQ ID NO: 1053669 - DNA, 33 bp, Homo sapien
tctcaggtctggaaaaacactttatttgagcag

SEQ ID NO: 1053670 - DNA, 33 bp, Homo sapien
tctcaggtctggaaaagcactttatttgagcag

SEQ ID NO: 1053671 - DNA, 33 bp, Homo sapien
tttgaactgagcttacaataaacaagcagcatt

SEQ ID NO: 1053672 - DNA, 33 bp, Homo sapien
tttgaactgagcttacgataaacaagcagcatt

SEQ ID NO: 1053673 - DNA, 33 bp, Homo sapien
gaagtctgaaaggtcaccacattgcaatgctag

SEQ ID NO: 1053674 - DNA, 33 bp, Homo sapien
gaagtctgaaaggtcatcacattgcaatgctag

SEQ ID NO: 1053675 - DNA, 33 bp, Homo sapien
agtctggagttcccaaccagaattttacatgag

SEQ ID NO: 1053676 - DNA, 33 bp, Homo sapien
agtctggagttcccaatcagaattttacatgag

SEQ ID NO: 1053677 - DNA, 33 bp, Homo sapien
gtgtcctgaataaaagacttcacttgctttccc

SEQ ID NO: 1053678 - DNA, 33 bp, Homo sapien
gtgtcctgaataaaagccttcacttgctttccc

SEQ ID NO: 1053679 - DNA, 33 bp, Homo sapien
ataatggctaccttgacagactatgtaacaagg

SEQ ID NO: 1053680 - DNA, 33 bp, Homo sapien
ataatggctaccttgatagactatgtaacaagg

SEQ ID NO: 1053681 - DNA, 33 bp, Homo sapien
atctctcctaatccaccctatctgtgttacaca

SEQ ID NO: 1053682 - DNA, 33 bp, Homo sapien
atctctcctaatccactctatctgtgttacaca

SEQ ID NO: 1053683 - DNA, 33 bp, Homo sapien
actttcttccagaacacgtcttcatcagcagtt

SEQ ID NO: 1053684 - DNA, 33 bp, Homo sapien
actttcttccagaacatgtcttcatcagcagtt

SEQ ID NO: 1053685 - DNA, 33 bp, Homo sapien
tttctaagtgagtattcaagtttacaaaacagg

SEQ ID NO: 1053686 - DNA, 33 bp, Homo sapien
tttctaagtgagtatttaagtttacaaaacagg

SEQ ID NO: 1053687 - DNA, 33 bp, Homo sapien
ggacatcatccgagatcagaactgtctacttgg

SEQ ID NO: 1053688 - DNA, 33 bp, Homo sapien
ggacatcatccgagattagaactgtctacttgg

SEQ ID NO: 1053689 - DNA, 33 bp, Homo sapien
caaatgggatgatgaaatagcactggagttcag

SEQ ID NO: 1053690 - DNA, 33 bp, Homo sapien
caaatgggatgatgaagtagcactggagttcag

SEQ ID NO: 1053691 - DNA, 33 bp, Homo sapien
gtttttgggaaaaccaatggcacttctttttcc

SEQ ID NO: 1053692 - DNA, 33 bp, Homo sapien
gtttttgggaaaaccagtggcacttctttttcc

SEQ ID NO: 1053693 - DNA, 33 bp, Homo sapien
ctagttgttaagggaaagctcttctttacagaa

SEQ ID NO: 1053694 - DNA, 33 bp, Homo sapien
ctagttgttaagggaacgctcttctttacagaa

SEQ ID NO: 1053695 - DNA, 33 bp, Homo sapien
gttttactcatcagatgagctgttcctaactac

SEQ ID NO: 1053696 - DNA, 33 bp, Homo sapien
gttttactcatcagattagctgttcctaactac

SEQ ID NO: 1053697 - DNA, 33 bp, Homo sapien
atcatatacaagtccacgttaaggtgtttgttt

SEQ ID NO: 1053698 - DNA, 33 bp, Homo sapien
atcatatacaagtccatgttaaggtgtttgttt

SEQ ID NO: 1053699 - DNA, 33 bp, Homo sapien
gaaagctcatgtcatacggatggtgggttatta

SEQ ID NO: 1053700 - DNA, 33 bp, Homo sapien
gaaagctcatgtcatatggatggtgggttatta

SEQ ID NO: 1053701 - DNA, 33 bp, Homo sapien
tctgttctttattatcacaccatatttcctcaa

SEQ ID NO: 1053702 - DNA, 33 bp, Homo sapien
tctgttctttattatcgcaccatatttcctcaa

SEQ ID NO: 1053703 - DNA, 33 bp, Homo sapien
ttctcggttgagtaaacgaaccacgcagcaacg

SEQ ID NO: 1053704 - DNA, 33 bp, Homo sapien
ttctcggttgagtaaatgaaccacgcagcaacg

SEQ ID NO: 1053705 - DNA, 33 bp, Homo sapien
gtgcttatttaaggaaatagtgctcaataaacc

SEQ ID NO: 1053706 - DNA, 33 bp, Homo sapien
gtgcttatttaaggaattagtgctcaataaacc

SEQ ID NO: 1053707 - DNA, 33 bp, Homo sapien
atttccttatctataaaatggtaatactgacct

SEQ ID NO: 1053708 - DNA, 33 bp, Homo sapien
atttccttatctataagatggtaatactgacct

SEQ ID NO: 1053709 - DNA, 33 bp, Homo sapien
aagttgttcaaactgacggaaaattataccaga

SEQ ID NO: 1053710 - DNA, 33 bp, Homo sapien
aagttgttcaaactgatggaaaattataccaga

SEQ ID NO: 1053711 - DNA, 33 bp, Homo sapien
aaaaaagaacaaggaacaaaagttgtgtgaatt

SEQ ID NO: 1053712 - DNA, 33 bp, Homo sapien
aaaaaagaacaaggaagaaaagttgtgtgaatt

SEQ ID NO: 1053713 - DNA, 33 bp, Homo sapien
gcagagctggcagagacgtgttgagacagggaa

SEQ ID NO: 1053714 - DNA, 33 bp, Homo sapien
gcagagctggcagagatgtgttgagacagggaa

SEQ ID NO: 1053715 - DNA, 33 bp, Homo sapien
aggtcaaaggcagaacaggagaaggtagaaatg

SEQ ID NO: 1053716 - DNA, 33 bp, Homo sapien
aggtcaaaggcagaaccggagaaggtagaaatg

SEQ ID NO: 1053717 - DNA, 33 bp, Homo sapien
gtactgtttgttagaactgcgaaggaggggcct

SEQ ID NO: 1053718 - DNA, 33 bp, Homo sapien
gtactgtttgttagaagtgcgaaggaggggcct

SEQ ID NO: 1053719 - DNA, 33 bp, Homo sapien
ttaaaatacagactggaatgtaaaccacacaca

SEQ ID NO: 1053720 - DNA, 33 bp, Homo sapien
ttaaaatacagactggcatgtaaaccacacaca

SEQ ID NO: 1053721 - DNA, 33 bp, Homo sapien
aaaagttatcatctgaatcaagacttgtgtata

SEQ ID NO: 1053722 - DNA, 33 bp, Homo sapien
aaaagttatcatctgagtcaagacttgtgtata

SEQ ID NO: 1053723 - DNA, 33 bp, Homo sapien
tgccttcagttacacaagaagagatcatgacag

SEQ ID NO: 1053724 - DNA, 33 bp, Homo sapien
tgccttcagttacacaggaagagatcatgacag

SEQ ID NO: 1053725 - DNA, 33 bp, Homo sapien
aaaaatctggtctcaaatgatagaaaagtgact

SEQ ID NO: 1053726 - DNA, 33 bp, Homo sapien
aaaaatctggtctcaagtgatagaaaagtgact

SEQ ID NO: 1053727 - DNA, 33 bp, Homo sapien
ctgttcttctgttcgaataatgagttcagatgg

SEQ ID NO: 1053728 - DNA, 33 bp, Homo sapien
ctgttcttctgttcgagtaatgagttcagatgg

SEQ ID NO: 1053729 - DNA, 33 bp, Homo sapien
atctagaatgattgcccacttcttttgctagct

SEQ ID NO: 1053730 - DNA, 33 bp, Homo sapien
atctagaatgattgccgacttcttttgctagct

SEQ ID NO: 1053731 - DNA, 33 bp, Homo sapien
gtgactctaagggttacaagcaacctgaacttt

SEQ ID NO: 1053732 - DNA, 33 bp, Homo sapien
gtgactctaagggttataagcaacctgaacttt

SEQ ID NO: 1053733 - DNA, 33 bp, Homo sapien
gatagtttaataggcaaaattagcaggacttag

SEQ ID NO: 1053734 - DNA, 33 bp, Homo sapien
gatagtttaataggcagaattagcaggacttag

SEQ ID NO: 1053735 - DNA, 33 bp, Homo sapien
agtttgagaaatcctcaagtaaatcatgtgttc

SEQ ID NO: 1053736 - DNA, 33 bp, Homo sapien
agtttgagaaatcctcgagtaaatcatgtgttc

SEQ ID NO: 1053737 - DNA, 33 bp, Homo sapien
acttttgactgtgggaactattcattgaggtgg

SEQ ID NO: 1053738 - DNA, 33 bp, Homo sapien
acttttgactgtgggatctattcattgaggtgg

SEQ ID NO: 1053739 - DNA, 33 bp, Homo sapien
gcgaaatgtactctgcaaactttttgtaaggat

SEQ ID NO: 1053740 - DNA, 33 bp, Homo sapien
gcgaaatgtactctgcgaactttttgtaaggat

SEQ ID NO: 1053741 - DNA, 33 bp, Homo sapien
tgtatgtattgtagaacagattcttagaagtaa

SEQ ID NO: 1053742 - DNA, 33 bp, Homo sapien
tgtatgtattgtagaatagattcttagaagtaa

SEQ ID NO: 1053743 - DNA, 33 bp, Homo sapien
gcttttatagtgttaaactttgcagctttaaca

SEQ ID NO: 1053744 - DNA, 33 bp, Homo sapien
gcttttatagtgttaatctttgcagctttaaca

SEQ ID NO: 1053745 - DNA, 33 bp, Homo sapien
atcaaccatgaatccaagtgttaccagagtttg

SEQ ID NO: 1053746 - DNA, 33 bp, Homo sapien
atcaaccatgaatccaggtgttaccagagtttg

SEQ ID NO: 1053747 - DNA, 33 bp, Homo sapien
ggaagaaagaaacttaactggaatcaaaagatg

SEQ ID NO: 1053748 - DNA, 33 bp, Homo sapien
ggaagaaagaaacttatctggaatcaaaagatg

SEQ ID NO: 1053749 - DNA, 33 bp, Homo sapien
tcataccactcaaagaacaaacggctgaaaagc

SEQ ID NO: 1053750 - DNA, 33 bp, Homo sapien
tcataccactcaaagagcaaacggctgaaaagc

SEQ ID NO: 1053751 - DNA, 33 bp, Homo sapien
cctgcctggggctagaatagttacttctagtct

SEQ ID NO: 1053752 - DNA, 33 bp, Homo sapien
cctgcctggggctagagtagttacttctagtct

SEQ ID NO: 1053753 - DNA, 33 bp, Homo sapien
aactccattttttctaccatttggctccagact

SEQ ID NO: 1053754 - DNA, 33 bp, Homo sapien
aactccattttttctatcatttggctccagact

SEQ ID NO: 1053755 - DNA, 33 bp, Homo sapien
ctggaattttacacccagcaaataaacttttat

SEQ ID NO: 1053756 - DNA, 33 bp, Homo sapien
ctggaattttacacccggcaaataaacttttat

SEQ ID NO: 1053757 - DNA, 33 bp, Homo sapien
gagaaggtccaatatacgtaacaactagagttt

SEQ ID NO: 1053758 - DNA, 33 bp, Homo sapien
gagaaggtccaatatatgtaacaactagagttt

SEQ ID NO: 1053759 - DNA, 33 bp, Homo sapien
taaacactatgccaaacatagggttcaaagtgg

SEQ ID NO: 1053760 - DNA, 33 bp, Homo sapien
taaacactatgccaaatatagggttcaaagtgg

SEQ ID NO: 1053761 - DNA, 33 bp, Homo sapien
caaaagtgtccctaaccgtggtggattctgtga

SEQ ID NO: 1053762 - DNA, 33 bp, Homo sapien
caaaagtgtccctaactgtggtggattctgtga

SEQ ID NO: 1053763 - DNA, 33 bp, Homo sapien
tatatgattttgtaaaaatgcaacacactaaat

SEQ ID NO: 1053764 - DNA, 33 bp, Homo sapien
tatatgattttgtaaatatgcaacacactaaat

SEQ ID NO: 1053765 - DNA, 33 bp, Homo sapien
atatgtctcggctatcacagatgagttttaaaa

SEQ ID NO: 1053766 - DNA, 33 bp, Homo sapien
atatgtctcggctatcgcagatgagttttaaaa

SEQ ID NO: 1053767 - DNA, 33 bp, Homo sapien
attgtgactctgaatgaataccatagttttgtt

SEQ ID NO: 1053768 - DNA, 33 bp, Homo sapien
attgtgactctgaatgcataccatagttttgtt

SEQ ID NO: 1053769 - DNA, 33 bp, Homo sapien
agaatgtcattgatttcaaagctaaaacttata

SEQ ID NO: 1053770 - DNA, 33 bp, Homo sapien
agaatgtcattgatttgaaagctaaaacttata

SEQ ID NO: 1053771 - DNA, 33 bp, Homo sapien
cacacatgcacacaaaagataaaatgatagatg

SEQ ID NO: 1053772 - DNA, 33 bp, Homo sapien
cacacatgcacacaaaggataaaatgatagatg

SEQ ID NO: 1053773 - DNA, 33 bp, Homo sapien
gaatcgaacttgactaaaatgattacaaaatca

SEQ ID NO: 1053774 - DNA, 33 bp, Homo sapien
gaatcgaacttgactataatgattacaaaatca

SEQ ID NO: 1053775 - DNA, 33 bp, Homo sapien
atcatagcacctctacaggttgcagtatcctcc

SEQ ID NO: 1053776 - DNA, 33 bp, Homo sapien
atcatagcacctctacgggttgcagtatcctcc

SEQ ID NO: 1053777 - DNA, 33 bp, Homo sapien
tctctctagctataaacgtcctagatggtatct

SEQ ID NO: 1053778 - DNA, 33 bp, Homo sapien
tctctctagctataaatgtcctagatggtatct

SEQ ID NO: 1053779 - DNA, 33 bp, Homo sapien
gttccattgatgtataagcctatccttatgacg

SEQ ID NO: 1053780 - DNA, 33 bp, Homo sapien
gttccattgatgtatatgcctatccttatgacg

SEQ ID NO: 1053781 - DNA, 33 bp, Homo sapien
cattggaggaattcaaatcaaaatgagaatgag

SEQ ID NO: 1053782 - DNA, 33 bp, Homo sapien
cattggaggaattcaagtcaaaatgagaatgag

SEQ ID NO: 1053783 - DNA, 33 bp, Homo sapien
ttgctaggttcccgtcaaaaggactaaggagcc

SEQ ID NO: 1053784 - DNA, 33 bp, Homo sapien
ttgctaggttcccgtctaaaggactaaggagcc

SEQ ID NO: 1053785 - DNA, 33 bp, Homo sapien
ttggtgatacacagacaagtcatccacacacca

SEQ ID NO: 1053786 - DNA, 33 bp, Homo sapien
ttggtgatacacagacgagtcatccacacacca

SEQ ID NO: 1053787 - DNA, 33 bp, Homo sapien
gaaatacaagagaatcaactgaaaaactattat

SEQ ID NO: 1053788 - DNA, 33 bp, Homo sapien
gaaatacaagagaatcgactgaaaaactattat

SEQ ID NO: 1053789 - DNA, 33 bp, Homo sapien
tatgggtactctagaactcaaggatggagccaa

SEQ ID NO: 1053790 - DNA, 33 bp, Homo sapien
tatgggtactctagaattcaaggatggagccaa

SEQ ID NO: 1053791 - DNA, 33 bp, Homo sapien
gagttggttgtcatcaatgaattgctagaactc

SEQ ID NO: 1053792 - DNA, 33 bp, Homo sapien
gagttggttgtcatcagtgaattgctagaactc

SEQ ID NO: 1053793 - DNA, 33 bp, Homo sapien
aataaatgatgatgaaacagtcctcattcttta

SEQ ID NO: 1053794 - DNA, 33 bp, Homo sapien
aataaatgatgatgaagcagtcctcattcttta

SEQ ID NO: 1053795 - DNA, 33 bp, Homo sapien
caaggcattaacgataaatttcttccctaccag

SEQ ID NO: 1053796 - DNA, 33 bp, Homo sapien
caaggcattaacgatacatttcttccctaccag

SEQ ID NO: 1053797 - DNA, 33 bp, Homo sapien
aatgcaaagttcaagaatcccaaactctgggtc

SEQ ID NO: 1053798 - DNA, 33 bp, Homo sapien
aatgcaaagttcaagattcccaaactctgggtc

SEQ ID NO: 1053799 - DNA, 33 bp, Homo sapien
tacattcttcaaaggtaaactgagttgagagga

SEQ ID NO: 1053800 - DNA, 33 bp, Homo sapien
tacattcttcaaaggttaactgagttgagagga

SEQ ID NO: 1053801 - DNA, 33 bp, Homo sapien
gtcggtacagatgctacgcctatatgcaccagt

SEQ ID NO: 1053802 - DNA, 33 bp, Homo sapien
gtcggtacagatgctatgcctatatgcaccagt

SEQ ID NO: 1053803 - DNA, 33 bp, Homo sapien
taacatgagagaccaactgaataggaaaaacca

SEQ ID NO: 1053804 - DNA, 33 bp, Homo sapien
taacatgagagaccaattgaataggaaaaacca

SEQ ID NO: 1053805 - DNA, 33 bp, Homo sapien
tttggctctgaactaccacagaagtatctaaac

SEQ ID NO: 1053806 - DNA, 33 bp, Homo sapien
tttggctctgaactactacagaagtatctaaac

SEQ ID NO: 1053807 - DNA, 33 bp, Homo sapien
tgattcaccagttttccaaatatttggcctttc

SEQ ID NO: 1053808 - DNA, 33 bp, Homo sapien
tgattcaccagttttctaaatatttggcctttc

SEQ ID NO: 1053809 - DNA, 33 bp, Homo sapien
ctgcttcaaaataaaacggaatgagattatgct

SEQ ID NO: 1053810 - DNA, 33 bp, Homo sapien
ctgcttcaaaataaaatggaatgagattatgct

SEQ ID NO: 1053811 - DNA, 33 bp, Homo sapien
ttttgaaattcatcaacgtggagtaattccctg

SEQ ID NO: 1053812 - DNA, 33 bp, Homo sapien
ttttgaaattcatcaatgtggagtaattccctg

SEQ ID NO: 1053813 - DNA, 33 bp, Homo sapien
atagcaagtttatccacattgaggaaaaaggag

SEQ ID NO: 1053814 - DNA, 33 bp, Homo sapien
atagcaagtttatccatattgaggaaaaaggag

SEQ ID NO: 1053815 - DNA, 33 bp, Homo sapien
ttggcctcccaaagacaacagtttcggactgac

SEQ ID NO: 1053816 - DNA, 33 bp, Homo sapien
ttggcctcccaaagacgacagtttcggactgac

SEQ ID NO: 1053817 - DNA, 33 bp, Homo sapien
tactgaaaaccagaaagagctcaagcatataaa

SEQ ID NO: 1053818 - DNA, 33 bp, Homo sapien
tactgaaaaccagaaatagctcaagcatataaa

SEQ ID NO: 1053819 - DNA, 33 bp, Homo sapien
aatgatcatgttaaaacacagcttgttgggcct

SEQ ID NO: 1053820 - DNA, 33 bp, Homo sapien
aatgatcatgttaaaatacagcttgttgggcct

SEQ ID NO: 1053821 - DNA, 33 bp, Homo sapien
gaataaagtatttcaacgggaaaatgaaagtat

SEQ ID NO: 1053822 - DNA, 33 bp, Homo sapien
gaataaagtatttcaaggggaaaatgaaagtat

SEQ ID NO: 1053823 - DNA, 33 bp, Homo sapien
agtgcctccaggaagcaatagataaagggcatt

SEQ ID NO: 1053824 - DNA, 33 bp, Homo sapien
agtgcctccaggaagcgatagataaagggcatt

SEQ ID NO: 1053825 - DNA, 33 bp, Homo sapien
tgaaaccaagacacacaaaatatacagcatctt

SEQ ID NO: 1053826 - DNA, 33 bp, Homo sapien
tgaaaccaagacacacgaaatatacagcatctt

SEQ ID NO: 1053827 - DNA, 33 bp, Homo sapien
atttttaaaagattccacaccgtcatactattt

SEQ ID NO: 1053828 - DNA, 33 bp, Homo sapien
atttttaaaagattcctcaccgtcatactattt

SEQ ID NO: 1053829 - DNA, 33 bp, Homo sapien
gaccccagattaagaactgttgctctaatggaa

SEQ ID NO: 1053830 - DNA, 33 bp, Homo sapien
gaccccagattaagaattgttgctctaatggaa

SEQ ID NO: 1053831 - DNA, 33 bp, Homo sapien
agttcagtgtcaggtaccaggcaccactgcagc

SEQ ID NO: 1053832 - DNA, 33 bp, Homo sapien
agttcagtgtcaggtatcaggcaccactgcagc

SEQ ID NO: 1053833 - DNA, 33 bp, Homo sapien
cccggcagctgaggcacaaagagaaacctcaga

SEQ ID NO: 1053834 - DNA, 33 bp, Homo sapien
cccggcagctgaggcagaaagagaaacctcaga

SEQ ID NO: 1053835 - DNA, 33 bp, Homo sapien
ataatattcagtggacaatagcagctgcttcat

SEQ ID NO: 1053836 - DNA, 33 bp, Homo sapien
ataatattcagtggacgatagcagctgcttcat

SEQ ID NO: 1053837 - DNA, 33 bp, Homo sapien
atccctttcttggctacgtcaaattgtccttgt

SEQ ID NO: 1053838 - DNA, 33 bp, Homo sapien
atccctttcttggctatgtcaaattgtccttgt

SEQ ID NO: 1053839 - DNA, 33 bp, Homo sapien
gtgtctgcctgcaaaaactgataattaagaagc

SEQ ID NO: 1053840 - DNA, 33 bp, Homo sapien
gtgtctgcctgcaaaagctgataattaagaagc

SEQ ID NO: 1053841 - DNA, 33 bp, Homo sapien
ctattcctccttcagcaaatttatgatatacag

SEQ ID NO: 1053842 - DNA, 33 bp, Homo sapien
ctattcctccttcagcgaatttatgatatacag

SEQ ID NO: 1053843 - DNA, 33 bp, Homo sapien
acaagttcatgggtgccctacactccagaccta

SEQ ID NO: 1053844 - DNA, 33 bp, Homo sapien
acaagttcatgggtgctctacactccagaccta

SEQ ID NO: 1053845 - DNA, 33 bp, Homo sapien
catttgtgaaacctccacaaacaccacggatgg

SEQ ID NO: 1053846 - DNA, 33 bp, Homo sapien
catttgtgaaacctccgcaaacaccacggatgg

SEQ ID NO: 1053847 - DNA, 33 bp, Homo sapien
acctaataaaaaccacaaagaaagatgctcaga

SEQ ID NO: 1053848 - DNA, 33 bp, Homo sapien
acctaataaaaaccacgaagaaagatgctcaga

SEQ ID NO: 1053849 - DNA, 33 bp, Homo sapien
atggaaaatggctcacaatctattttaaagtta

SEQ ID NO: 1053850 - DNA, 33 bp, Homo sapien
atggaaaatggctcaccatctattttaaagtta

SEQ ID NO: 1053851 - DNA, 33 bp, Homo sapien
cagctattgaagctacacaaaaggtagagttga

SEQ ID NO: 1053852 - DNA, 33 bp, Homo sapien
cagctattgaagctacgcaaaaggtagagttga

SEQ ID NO: 1053853 - DNA, 33 bp, Homo sapien
tgcaaataatggttcacgctctgttaattatgg

SEQ ID NO: 1053854 - DNA, 33 bp, Homo sapien
tgcaaataatggttcatgctctgttaattatgg

SEQ ID NO: 1053855 - DNA, 33 bp, Homo sapien
ggacaaatgtcacaggaaaaattaagactgttc

SEQ ID NO: 1053856 - DNA, 33 bp, Homo sapien
ggacaaatgtcacagggaaaattaagactgttc

SEQ ID NO: 1053857 - DNA, 33 bp, Homo sapien
acccaataaatcatcaactaacctactcaagaa

SEQ ID NO: 1053858 - DNA, 33 bp, Homo sapien
acccaataaatcatcagctaacctactcaagaa

SEQ ID NO: 1053859 - DNA, 33 bp, Homo sapien
gccagggttatcagccactatgtaaaccaggta

SEQ ID NO: 1053860 - DNA, 33 bp, Homo sapien
gccagggttatcagccgctatgtaaaccaggta

SEQ ID NO: 1053861 - DNA, 33 bp, Homo sapien
tcctgaatatcttttcaatctgtggctggttga

SEQ ID NO: 1053862 - DNA, 33 bp, Homo sapien
tcctgaatatcttttcgatctgtggctggttga

SEQ ID NO: 1053863 - DNA, 33 bp, Homo sapien
ccagtgtgtgcttgaccatagcaataatagctg

SEQ ID NO: 1053864 - DNA, 33 bp, Homo sapien
ccagtgtgtgcttgacgatagcaataatagctg

SEQ ID NO: 1053865 - DNA, 33 bp, Homo sapien
tccctcatccccatcaagactgtatcagcagag

SEQ ID NO: 1053866 - DNA, 33 bp, Homo sapien
tccctcatccccatcaggactgtatcagcagag

SEQ ID NO: 1053867 - DNA, 33 bp, Homo sapien
ggtgagcgtttaaagaagggagataaaggccaa

SEQ ID NO: 1053868 - DNA, 33 bp, Homo sapien
ggtgagcgtttaaagatgggagataaaggccaa

SEQ ID NO: 1053869 - DNA, 33 bp, Homo sapien
tcattatctgtatattcaaatggtctttccagc

SEQ ID NO: 1053870 - DNA, 33 bp, Homo sapien
tcattatctgtatatttaaatggtctttccagc

SEQ ID NO: 1053871 - DNA, 33 bp, Homo sapien
tctgtgtcttctagctaaaaggcactggagtct

SEQ ID NO: 1053872 - DNA, 33 bp, Homo sapien
tctgtgtcttctagctgaaaggcactggagtct

SEQ ID NO: 1053873 - DNA, 33 bp, Homo sapien
ataacaaggttctaatcaagtttaaataaggta

SEQ ID NO: 1053874 - DNA, 33 bp, Homo sapien
ataacaaggttctaatgaagtttaaataaggta

SEQ ID NO: 1053875 - DNA, 33 bp, Homo sapien
tctttctaaagatgaacggaactaccctgagct

SEQ ID NO: 1053876 - DNA, 33 bp, Homo sapien
tctttctaaagatgaatggaactaccctgagct

SEQ ID NO: 1053877 - DNA, 33 bp, Homo sapien
aatgttgttttcatcacggacaggtgcgttcct

SEQ ID NO: 1053878 - DNA, 33 bp, Homo sapien
aatgttgttttcatcatggacaggtgcgttcct

SEQ ID NO: 1053879 - DNA, 33 bp, Homo sapien
cttggtaatttttaaacagatgcacaattcatt

SEQ ID NO: 1053880 - DNA, 33 bp, Homo sapien
cttggtaatttttaaatagatgcacaattcatt

SEQ ID NO: 1053881 - DNA, 33 bp, Homo sapien
acattatagtcgtgtcaaagactaacataaggc

SEQ ID NO: 1053882 - DNA, 33 bp, Homo sapien
acattatagtcgtgtcgaagactaacataaggc

SEQ ID NO: 1053883 - DNA, 33 bp, Homo sapien
ctttgatgcttatgaactgtcacactctgtctc

SEQ ID NO: 1053884 - DNA, 33 bp, Homo sapien
ctttgatgcttatgaagtgtcacactctgtctc

SEQ ID NO: 1053885 - DNA, 33 bp, Homo sapien
aatcaaggactctttaaccagttttgcaatatt

SEQ ID NO: 1053886 - DNA, 33 bp, Homo sapien
aatcaaggactctttacccagttttgcaatatt

SEQ ID NO: 1053887 - DNA, 33 bp, Homo sapien
gaaggtttggaaggtcaaaatcaaggactcttt

SEQ ID NO: 1053888 - DNA, 33 bp, Homo sapien
gaaggtttggaaggtcgaaatcaaggactcttt

SEQ ID NO: 1053889 - DNA, 33 bp, Homo sapien
ggattctacctgatgacgtcagaaaagacttcc

SEQ ID NO: 1053890 - DNA, 33 bp, Homo sapien
ggattctacctgatgatgtcagaaaagacttcc

SEQ ID NO: 1053891 - DNA, 33 bp, Homo sapien
tgctactgtaagtgagacctatggacctacagc

SEQ ID NO: 1053892 - DNA, 33 bp, Homo sapien
tgctactgtaagtgaggcctatggacctacagc

SEQ ID NO: 1053893 - DNA, 33 bp, Homo sapien
taggaaaatacgatcactcatggatctattcct

SEQ ID NO: 1053894 - DNA, 33 bp, Homo sapien
taggaaaatacgatcattcatggatctattcct

SEQ ID NO: 1053895 - DNA, 33 bp, Homo sapien
tccaaaacattgatacaaccaaatgctggcaag

SEQ ID NO: 1053896 - DNA, 33 bp, Homo sapien
tccaaaacattgataccaccaaatgctggcaag

SEQ ID NO: 1053897 - DNA, 33 bp, Homo sapien
ccttctactccctgtaaaagttctgcagccacc

SEQ ID NO: 1053898 - DNA, 33 bp, Homo sapien
ccttctactccctgtataagttctgcagccacc

SEQ ID NO: 1053899 - DNA, 33 bp, Homo sapien
aactctgcattgctaaatactttaaatcttcct

SEQ ID NO: 1053900 - DNA, 33 bp, Homo sapien
aactctgcattgctaagtactttaaatcttcct

SEQ ID NO: 1053901 - DNA, 33 bp, Homo sapien
aacctaaatcaaatataataggtagcttctgtg

SEQ ID NO: 1053902 - DNA, 33 bp, Homo sapien
aacctaaatcaaatatgataggtagcttctgtg

SEQ ID NO: 1053903 - DNA, 33 bp, Homo sapien
atgatttcaaaaaatccatgcatgtgttaactt

SEQ ID NO: 1053904 - DNA, 33 bp, Homo sapien
atgatttcaaaaaatctatgcatgtgttaactt

SEQ ID NO: 1053905 - DNA, 33 bp, Homo sapien
ataatagtttacttgcaaatgaatgtatccctc

SEQ ID NO: 1053906 - DNA, 33 bp, Homo sapien
ataatagtttacttgcgaatgaatgtatccctc

SEQ ID NO: 1053907 - DNA, 33 bp, Homo sapien
catatcagaagacacaatgtctggttaagctgc

SEQ ID NO: 1053908 - DNA, 33 bp, Homo sapien
catatcagaagacacactgtctggttaagctgc

SEQ ID NO: 1053909 - DNA, 33 bp, Homo sapien
ctgggtttctcaatcacggagctattaacacct

SEQ ID NO: 1053910 - DNA, 33 bp, Homo sapien
ctgggtttctcaatcatggagctattaacacct

SEQ ID NO: 1053911 - DNA, 33 bp, Homo sapien
ctcagttcagccttctcaaaaggtaaaattgac

SEQ ID NO: 1053912 - DNA, 33 bp, Homo sapien
ctcagttcagccttctgaaaaggtaaaattgac

SEQ ID NO: 1053913 - DNA, 33 bp, Homo sapien
ggagcttatgtcctcacgggggagacagagtat

SEQ ID NO: 1053914 - DNA, 33 bp, Homo sapien
ggagcttatgtcctcatgggggagacagagtat

SEQ ID NO: 1053915 - DNA, 33 bp, Homo sapien
gtccaagcaggttttagcgtttgtattaagtaa

SEQ ID NO: 1053916 - DNA, 33 bp, Homo sapien
gtccaagcaggttttatcgtttgtattaagtaa

SEQ ID NO: 1053917 - DNA, 33 bp, Homo sapien
accactgttccacttgcatggcctgttattctt

SEQ ID NO: 1053918 - DNA, 33 bp, Homo sapien
accactgttccacttgtatggcctgttattctt

SEQ ID NO: 1053919 - DNA, 33 bp, Homo sapien
ttgaaaactgcagggacaaaaatagattaaaaa

SEQ ID NO: 1053920 - DNA, 33 bp, Homo sapien
ttgaaaactgcagggataaaaatagattaaaaa

SEQ ID NO: 1053921 - DNA, 33 bp, Homo sapien
accacgttgcaatgaggacagcatcaattccgt

SEQ ID NO: 1053922 - DNA, 33 bp, Homo sapien
accacgttgcaatgagtacagcatcaattccgt

SEQ ID NO: 1053923 - DNA, 33 bp, Homo sapien
aacggaggtagcatcactgatcatacacttttg

SEQ ID NO: 1053924 - DNA, 33 bp, Homo sapien
aacggaggtagcatcattgatcatacacttttg

SEQ ID NO: 1053925 - DNA, 33 bp, Homo sapien
aaacacttagttcccagtaacttgatttaagat

SEQ ID NO: 1053926 - DNA, 33 bp, Homo sapien
aaacacttagttcccattaacttgatttaagat

SEQ ID NO: 1053927 - DNA, 33 bp, Homo sapien
ggtacatgatctgtgaatataaaatgaaatttg

SEQ ID NO: 1053928 - DNA, 33 bp, Homo sapien
ggtacatgatctgtgagtataaaatgaaatttg

SEQ ID NO: 1053929 - DNA, 33 bp, Homo sapien
gaaattttcttgtgacaaagctccaatggaaat

SEQ ID NO: 1053930 - DNA, 33 bp, Homo sapien
gaaattttcttgtgacgaagctccaatggaaat

SEQ ID NO: 1053931 - DNA, 33 bp, Homo sapien
tatccactttttccatcatcacttgttgaaagg

SEQ ID NO: 1053932 - DNA, 33 bp, Homo sapien
tatccactttttccattatcacttgttgaaagg

SEQ ID NO: 1053933 - DNA, 33 bp, Homo sapien
ctttgctttcaaacgaaagtttacagaccatta

SEQ ID NO: 1053934 - DNA, 33 bp, Homo sapien
ctttgctttcaaacgagagtttacagaccatta

SEQ ID NO: 1053935 - DNA, 33 bp, Homo sapien
tgattcaaaatctttacggaaggcaatctaagc

SEQ ID NO: 1053936 - DNA, 33 bp, Homo sapien
tgattcaaaatctttatggaaggcaatctaagc

SEQ ID NO: 1053937 - DNA, 33 bp, Homo sapien
tttatgtagatgcaggacatagtttagaaaacg

SEQ ID NO: 1053938 - DNA, 33 bp, Homo sapien
tttatgtagatgcagggcatagtttagaaaacg

SEQ ID NO: 1053939 - DNA, 33 bp, Homo sapien
ttttcccatgtgtccaataaatactaggtctcc

SEQ ID NO: 1053940 - DNA, 33 bp, Homo sapien
ttttcccatgtgtccagtaaatactaggtctcc

SEQ ID NO: 1053941 - DNA, 33 bp, Homo sapien
gttaatgtggccagtaaaaccctgattcctttt

SEQ ID NO: 1053942 - DNA, 33 bp, Homo sapien
gttaatgtggccagtataaccctgattcctttt

SEQ ID NO: 1053943 - DNA, 33 bp, Homo sapien
tgtgctttctgaagggaagtcatgttttccttg

SEQ ID NO: 1053944 - DNA, 33 bp, Homo sapien
tgtgctttctgaaggggagtcatgttttccttg

SEQ ID NO: 1053945 - DNA, 33 bp, Homo sapien
tttacaaatgtaaaaaattcccagttcaaatcg

SEQ ID NO: 1053946 - DNA, 33 bp, Homo sapien
tttacaaatgtaaaaagttcccagttcaaatcg

SEQ ID NO: 1053947 - DNA, 33 bp, Homo sapien
caattccagtcctgagccaatattccataaaaa

SEQ ID NO: 1053948 - DNA, 33 bp, Homo sapien
caattccagtcctgagtcaatattccataaaaa

SEQ ID NO: 1053949 - DNA, 33 bp, Homo sapien
tctcactgctaaggacaggaaagattaagaaag

SEQ ID NO: 1053950 - DNA, 33 bp, Homo sapien
tctcactgctaaggacgggaaagattaagaaag

SEQ ID NO: 1053951 - DNA, 33 bp, Homo sapien
ctatgtctctgaggatcaggttcagctgcaagg

SEQ ID NO: 1053952 - DNA, 33 bp, Homo sapien
ctatgtctctgaggattaggttcagctgcaagg

SEQ ID NO: 1053953 - DNA, 33 bp, Homo sapien
atactacagttctaaaacttttttgcatctaga

SEQ ID NO: 1053954 - DNA, 33 bp, Homo sapien
atactacagttctaaaccttttttgcatctaga

SEQ ID NO: 1053955 - DNA, 33 bp, Homo sapien
aagggtccttgatacacccgcatgaagaatgga

SEQ ID NO: 1053956 - DNA, 33 bp, Homo sapien
aagggtccttgatacatccgcatgaagaatgga

SEQ ID NO: 1053957 - DNA, 33 bp, Homo sapien
ccctgaatccacgctacgtatgtggaacagaga

SEQ ID NO: 1053958 - DNA, 33 bp, Homo sapien
ccctgaatccacgctaggtatgtggaacagaga

SEQ ID NO: 1053959 - DNA, 33 bp, Homo sapien
atgtactgttttcaaacggcctacaaagatttc

SEQ ID NO: 1053960 - DNA, 33 bp, Homo sapien
atgtactgttttcaaatggcctacaaagatttc

SEQ ID NO: 1053961 - DNA, 33 bp, Homo sapien
acaacagcaactacacactctgctcaaacacct

SEQ ID NO: 1053962 - DNA, 33 bp, Homo sapien
acaacagcaactacacgctctgctcaaacacct

SEQ ID NO: 1053963 - DNA, 33 bp, Homo sapien
ccaaataatctcattcaactgcatatccctcat

SEQ ID NO: 1053964 - DNA, 33 bp, Homo sapien
ccaaataatctcattcgactgcatatccctcat

SEQ ID NO: 1053965 - DNA, 33 bp, Homo sapien
tgtatatatctaataacaggctgtcaaaatttg

SEQ ID NO: 1053966 - DNA, 33 bp, Homo sapien
tgtatatatctaataataggctgtcaaaatttg

SEQ ID NO: 1053967 - DNA, 33 bp, Homo sapien
tctgaacagcaaactaaatttccatcaacaatt

SEQ ID NO: 1053968 - DNA, 33 bp, Homo sapien
tctgaacagcaaactagatttccatcaacaatt

SEQ ID NO: 1053969 - DNA, 33 bp, Homo sapien
cccctaccccacatcacagtgaagctcagatgg

SEQ ID NO: 1053970 - DNA, 33 bp, Homo sapien
cccctaccccacatcatagtgaagctcagatgg

SEQ ID NO: 1053971 - DNA, 33 bp, Homo sapien
atgcagtaaataaagaacattggaacaaaaaaa

SEQ ID NO: 1053972 - DNA, 33 bp, Homo sapien
atgcagtaaataaagagcattggaacaaaaaaa

SEQ ID NO: 1053973 - DNA, 33 bp, Homo sapien
gaagaggaccttgcccaacacttcctgagataa

SEQ ID NO: 1053974 - DNA, 33 bp, Homo sapien
gaagaggaccttgcccgacacttcctgagataa

SEQ ID NO: 1053975 - DNA, 33 bp, Homo sapien
taagtgagacagagcacggtaagtaccacaatt

SEQ ID NO: 1053976 - DNA, 33 bp, Homo sapien
taagtgagacagagcatggtaagtaccacaatt

SEQ ID NO: 1053977 - DNA, 33 bp, Homo sapien
taaattatggtagttaccacaaattcttggtac

SEQ ID NO: 1053978 - DNA, 33 bp, Homo sapien
taaattatggtagttatcacaaattcttggtac

SEQ ID NO: 1053979 - DNA, 33 bp, Homo sapien
tgggccttgattttaacgcctctcaatcaatat

SEQ ID NO: 1053980 - DNA, 33 bp, Homo sapien
tgggccttgattttaatgcctctcaatcaatat

SEQ ID NO: 1053981 - DNA, 33 bp, Homo sapien
ataaatctgcatttcacgttgagttagtggcta

SEQ ID NO: 1053982 - DNA, 33 bp, Homo sapien
ataaatctgcatttcatgttgagttagtggcta

SEQ ID NO: 1053983 - DNA, 33 bp, Homo sapien
tatcaacccagaaaccaagctattggtcttctc

SEQ ID NO: 1053984 - DNA, 33 bp, Homo sapien
tatcaacccagaaacctagctattggtcttctc

SEQ ID NO: 1053985 - DNA, 33 bp, Homo sapien
caccaccaaacaaatagggacacagaaactcag

SEQ ID NO: 1053986 - DNA, 33 bp, Homo sapien
caccaccaaacaaatatggacacagaaactcag

SEQ ID NO: 1053987 - DNA, 33 bp, Homo sapien
caaagctgtttatatagccatctgcctacttag

SEQ ID NO: 1053988 - DNA, 33 bp, Homo sapien
caaagctgtttatatatccatctgcctacttag

SEQ ID NO: 1053989 - DNA, 33 bp, Homo sapien
aaaggcattgccctagaaggctgtttataagga

SEQ ID NO: 1053990 - DNA, 33 bp, Homo sapien
aaaggcattgccctagcaggctgtttataagga

SEQ ID NO: 1053991 - DNA, 33 bp, Homo sapien
ttgttcttattttcaacatctaatgccttccct

SEQ ID NO: 1053992 - DNA, 33 bp, Homo sapien
ttgttcttattttcaatatctaatgccttccct

SEQ ID NO: 1053993 - DNA, 33 bp, Homo sapien
gaatcatgccagttaccagaaaagcttttgaaa

SEQ ID NO: 1053994 - DNA, 33 bp, Homo sapien
gaatcatgccagttacgagaaaagcttttgaaa

SEQ ID NO: 1053995 - DNA, 33 bp, Homo sapien
tcattattttcagctccgagatgactggtgatt

SEQ ID NO: 1053996 - DNA, 33 bp, Homo sapien
tcattattttcagctctgagatgactggtgatt

SEQ ID NO: 1053997 - DNA, 33 bp, Homo sapien
tgattaaactagaggacatcctggattgagcag

SEQ ID NO: 1053998 - DNA, 33 bp, Homo sapien
tgattaaactagaggagatcctggattgagcag

SEQ ID NO: 1053999 - DNA, 33 bp, Homo sapien
tcagggcaaattgaaaattgttggtgatgctgc

SEQ ID NO: 1054000 - DNA, 33 bp, Homo sapien
tcagggcaaattgaaagttgttggtgatgctgc

SEQ ID NO: 1054001 - DNA, 33 bp, Homo sapien
gcataacactggggtagatataaagaagcatga

SEQ ID NO: 1054002 - DNA, 33 bp, Homo sapien
gcataacactggggtatatataaagaagcatga

SEQ ID NO: 1054003 - DNA, 33 bp, Homo sapien
cttatttattcttccactatttatgtagataca

SEQ ID NO: 1054004 - DNA, 33 bp, Homo sapien
cttatttattcttccagtatttatgtagataca

SEQ ID NO: 1054005 - DNA, 33 bp, Homo sapien
tcaaaagacacaaaaggagacctgaaaaataga

SEQ ID NO: 1054006 - DNA, 33 bp, Homo sapien
tcaaaagacacaaaagtagacctgaaaaataga

SEQ ID NO: 1054007 - DNA, 33 bp, Homo sapien
ggaagaataaaaatgacaatgtcagctgggcgc

SEQ ID NO: 1054008 - DNA, 33 bp, Homo sapien
ggaagaataaaaatgataatgtcagctgggcgc

SEQ ID NO: 1054009 - DNA, 33 bp, Homo sapien
aatgaggatttagatacctttcattaccacctt

SEQ ID NO: 1054010 - DNA, 33 bp, Homo sapien
aatgaggatttagatatctttcattaccacctt

SEQ ID NO: 1054011 - DNA, 33 bp, Homo sapien
ttgtttagttctaccacgttctttaaatatttc

SEQ ID NO: 1054012 - DNA, 33 bp, Homo sapien
ttgtttagttctaccatgttctttaaatatttc

SEQ ID NO: 1054013 - DNA, 33 bp, Homo sapien
gttctttctactatacggctggtttttgtgcaa

SEQ ID NO: 1054014 - DNA, 33 bp, Homo sapien
gttctttctactatactgctggtttttgtgcaa

SEQ ID NO: 1054015 - DNA, 33 bp, Homo sapien
tctgcttctgaagagaccaacctctggggaagc

SEQ ID NO: 1054016 - DNA, 33 bp, Homo sapien
tctgcttctgaagagatcaacctctggggaagc

SEQ ID NO: 1054017 - DNA, 33 bp, Homo sapien
gaaggtattacaagtcatgccacagaaataaaa

SEQ ID NO: 1054018 - DNA, 33 bp, Homo sapien
gaaggtattacaagtcgtgccacagaaataaaa

SEQ ID NO: 1054019 - DNA, 33 bp, Homo sapien
gataggtctcatttaacagttcctaccaaaata

SEQ ID NO: 1054020 - DNA, 33 bp, Homo sapien
gataggtctcatttaagagttcctaccaaaata

SEQ ID NO: 1054021 - DNA, 33 bp, Homo sapien
ttgacagggagttgaacgccaatgccaccttat

SEQ ID NO: 1054022 - DNA, 33 bp, Homo sapien
ttgacagggagttgaatgccaatgccaccttat

SEQ ID NO: 1054023 - DNA, 33 bp, Homo sapien
aggctagtaactttcaatctcaccaaaacaatg

SEQ ID NO: 1054024 - DNA, 33 bp, Homo sapien
aggctagtaactttcagtctcaccaaaacaatg

SEQ ID NO: 1054025 - DNA, 33 bp, Homo sapien
cactttgaggataaaacgtaaacacgtaaatag

SEQ ID NO: 1054026 - DNA, 33 bp, Homo sapien
cactttgaggataaaaggtaaacacgtaaatag

SEQ ID NO: 1054027 - DNA, 33 bp, Homo sapien
gttactctctttagaacttatctaggaggaact

SEQ ID NO: 1054028 - DNA, 33 bp, Homo sapien
gttactctctttagaatttatctaggaggaact

SEQ ID NO: 1054029 - DNA, 33 bp, Homo sapien
caggagacaacataccgattccaactaaacaaa

SEQ ID NO: 1054030 - DNA, 33 bp, Homo sapien
caggagacaacatacctattccaactaaacaaa

SEQ ID NO: 1054031 - DNA, 33 bp, Homo sapien
acatgagattaagatacgctaattctcttgtgt

SEQ ID NO: 1054032 - DNA, 33 bp, Homo sapien
acatgagattaagatatgctaattctcttgtgt

SEQ ID NO: 1054033 - DNA, 33 bp, Homo sapien
accactttgctaaaccgagagaaagaagtataa

SEQ ID NO: 1054034 - DNA, 33 bp, Homo sapien
accactttgctaaacctagagaaagaagtataa

SEQ ID NO: 1054035 - DNA, 33 bp, Homo sapien
aaaccactgttccaggaaaataaggaatatgtc

SEQ ID NO: 1054036 - DNA, 33 bp, Homo sapien
aaaccactgttccaggcaaataaggaatatgtc

SEQ ID NO: 1054037 - DNA, 33 bp, Homo sapien
tgaagtctagcctaaagaattttgttttcctta

SEQ ID NO: 1054038 - DNA, 33 bp, Homo sapien
tgaagtctagcctaaataattttgttttcctta

SEQ ID NO: 1054039 - DNA, 33 bp, Homo sapien
ccagctgagtccagaccacattactgacccaga

SEQ ID NO: 1054040 - DNA, 33 bp, Homo sapien
ccagctgagtccagactacattactgacccaga

SEQ ID NO: 1054041 - DNA, 33 bp, Homo sapien
tgaatttcaagtactcggacattttcctttctc

SEQ ID NO: 1054042 - DNA, 33 bp, Homo sapien
tgaatttcaagtactctgacattttcctttctc

SEQ ID NO: 1054043 - DNA, 33 bp, Homo sapien
gcaggatgccagttgacggtaaggccagggaag

SEQ ID NO: 1054044 - DNA, 33 bp, Homo sapien
gcaggatgccagttgatggtaaggccagggaag

SEQ ID NO: 1054045 - DNA, 33 bp, Homo sapien
agattttagctggaagaagaagaggcaaaaatg

SEQ ID NO: 1054046 - DNA, 33 bp, Homo sapien
agattttagctggaaggagaagaggcaaaaatg

SEQ ID NO: 1054047 - DNA, 33 bp, Homo sapien
gaactctcagtgggtaaccggaagaacaagtta

SEQ ID NO: 1054048 - DNA, 33 bp, Homo sapien
gaactctcagtgggtacccggaagaacaagtta

SEQ ID NO: 1054049 - DNA, 33 bp, Homo sapien
attagcaatagaaaacaacctggtgattggagg

SEQ ID NO: 1054050 - DNA, 33 bp, Homo sapien
attagcaatagaaaaccacctggtgattggagg

SEQ ID NO: 1054051 - DNA, 33 bp, Homo sapien
cccctcagatacaggcagatattccattgctgg

SEQ ID NO: 1054052 - DNA, 33 bp, Homo sapien
cccctcagatacaggcggatattccattgctgg

SEQ ID NO: 1054053 - DNA, 33 bp, Homo sapien
aacctcagcactttcacggccaaaaggttaaaa

SEQ ID NO: 1054054 - DNA, 33 bp, Homo sapien
aacctcagcactttcatggccaaaaggttaaaa

SEQ ID NO: 1054055 - DNA, 33 bp, Homo sapien
tgtgccagggaaaaaactgatgtgatgaaaaga

SEQ ID NO: 1054056 - DNA, 33 bp, Homo sapien
tgtgccagggaaaaaattgatgtgatgaaaaga

SEQ ID NO: 1054057 - DNA, 33 bp, Homo sapien
ctagggtatcctccccaatgtagtgactcagca

SEQ ID NO: 1054058 - DNA, 33 bp, Homo sapien
ctagggtatcctccccgatgtagtgactcagca

SEQ ID NO: 1054059 - DNA, 33 bp, Homo sapien
cctgtgggacttagtcaaaaactgggtgggggc

SEQ ID NO: 1054060 - DNA, 33 bp, Homo sapien
cctgtgggacttagtcgaaaactgggtgggggc

SEQ ID NO: 1054061 - DNA, 33 bp, Homo sapien
taagcagctacagcaacgtgcattttcaacctt

SEQ ID NO: 1054062 - DNA, 33 bp, Homo sapien
taagcagctacagcaaggtgcattttcaacctt

SEQ ID NO: 1054063 - DNA, 33 bp, Homo sapien
ttatatgactaccttacctattctttcagccgt

SEQ ID NO: 1054064 - DNA, 33 bp, Homo sapien
ttatatgactaccttatctattctttcagccgt

SEQ ID NO: 1054065 - DNA, 33 bp, Homo sapien
tcttcaacagaaccataatgatgccagaagact

SEQ ID NO: 1054066 - DNA, 33 bp, Homo sapien
tcttcaacagaaccatgatgatgccagaagact

SEQ ID NO: 1054067 - DNA, 33 bp, Homo sapien
aagattctttgtgaccaaaataggcttcttgtg

SEQ ID NO: 1054068 - DNA, 33 bp, Homo sapien
aagattctttgtgaccgaaataggcttcttgtg

SEQ ID NO: 1054069 - DNA, 33 bp, Homo sapien
tcatgcagagggacaaaaccctgaagatctgtg

SEQ ID NO: 1054070 - DNA, 33 bp, Homo sapien
tcatgcagagggacaagaccctgaagatctgtg

SEQ ID NO: 1054071 - DNA, 33 bp, Homo sapien
aggccatctctgtccaataaaaatataacataa

SEQ ID NO: 1054072 - DNA, 33 bp, Homo sapien
aggccatctctgtccagtaaaaatataacataa

SEQ ID NO: 1054073 - DNA, 33 bp, Homo sapien
tctcagaagattttaaatagatctacacggcgc

SEQ ID NO: 1054074 - DNA, 33 bp, Homo sapien
tctcagaagattttaagtagatctacacggcgc

SEQ ID NO: 1054075 - DNA, 33 bp, Homo sapien
tttgtgcatttatgaaatatggctacctggaga

SEQ ID NO: 1054076 - DNA, 33 bp, Homo sapien
tttgtgcatttatgaagtatggctacctggaga

SEQ ID NO: 1054077 - DNA, 33 bp, Homo sapien
catggagtacttgtaacgatcaaatgagaacat

SEQ ID NO: 1054078 - DNA, 33 bp, Homo sapien
catggagtacttgtaaggatcaaatgagaacat

SEQ ID NO: 1054079 - DNA, 33 bp, Homo sapien
ttgtttgtacaaataactcctttatcataaaaa

SEQ ID NO: 1054080 - DNA, 33 bp, Homo sapien
ttgtttgtacaaataagtcctttatcataaaaa

SEQ ID NO: 1054081 - DNA, 33 bp, Homo sapien
atctacgtaattgacacgctctgtagttgtgct

SEQ ID NO: 1054082 - DNA, 33 bp, Homo sapien
atctacgtaattgacatgctctgtagttgtgct

SEQ ID NO: 1054083 - DNA, 33 bp, Homo sapien
cctaactaagtgcaccaagagggatgctttgtc

SEQ ID NO: 1054084 - DNA, 33 bp, Homo sapien
cctaactaagtgcaccgagagggatgctttgtc

SEQ ID NO: 1054085 - DNA, 33 bp, Homo sapien
gaatttggagagatgacgcaccagaaatacatg

SEQ ID NO: 1054086 - DNA, 33 bp, Homo sapien
gaatttggagagatgatgcaccagaaatacatg

SEQ ID NO: 1054087 - DNA, 33 bp, Homo sapien
acttgataaagcttgcagaacattacctttcct

SEQ ID NO: 1054088 - DNA, 33 bp, Homo sapien
acttgataaagcttgcggaacattacctttcct

SEQ ID NO: 1054089 - DNA, 33 bp, Homo sapien
accattgtacaaatcacacagtcctgctcacga

SEQ ID NO: 1054090 - DNA, 33 bp, Homo sapien
accattgtacaaatcatacagtcctgctcacga

SEQ ID NO: 1054091 - DNA, 33 bp, Homo sapien
cctctactaattgccaaggtatatctctccctg

SEQ ID NO: 1054092 - DNA, 33 bp, Homo sapien
cctctactaattgccacggtatatctctccctg

SEQ ID NO: 1054093 - DNA, 33 bp, Homo sapien
atatatcttgtggattcaaccctaacgttggct

SEQ ID NO: 1054094 - DNA, 33 bp, Homo sapien
atatatcttgtggatttaaccctaacgttggct

SEQ ID NO: 1054095 - DNA, 33 bp, Homo sapien
tgagtgcaagctacaggacagaaaggaaccatt

SEQ ID NO: 1054096 - DNA, 33 bp, Homo sapien
tgagtgcaagctacagtacagaaaggaaccatt

SEQ ID NO: 1054097 - DNA, 33 bp, Homo sapien
ctctgaattatttacactcaagaactttgcaag

SEQ ID NO: 1054098 - DNA, 33 bp, Homo sapien
ctctgaattatttacagtcaagaactttgcaag

SEQ ID NO: 1054099 - DNA, 33 bp, Homo sapien
agagctcagattgtaacaaaaatggctgactca

SEQ ID NO: 1054100 - DNA, 33 bp, Homo sapien
agagctcagattgtaataaaaatggctgactca

SEQ ID NO: 1054101 - DNA, 33 bp, Homo sapien
tatcatgtccttattccaagtgtattgttcatt

SEQ ID NO: 1054102 - DNA, 33 bp, Homo sapien
tatcatgtccttattctaagtgtattgttcatt

SEQ ID NO: 1054103 - DNA, 33 bp, Homo sapien
tagtaaaggacaggtaaggaagatcatggcaga

SEQ ID NO: 1054104 - DNA, 33 bp, Homo sapien
tagtaaaggacaggtagggaagatcatggcaga

SEQ ID NO: 1054105 - DNA, 33 bp, Homo sapien
tccgactgctttgagcgcctataccacgctaaa

SEQ ID NO: 1054106 - DNA, 33 bp, Homo sapien
tccgactgctttgagctcctataccacgctaaa

SEQ ID NO: 1054107 - DNA, 33 bp, Homo sapien
agtagaaaaatattggaaaattgcagtgtattg

SEQ ID NO: 1054108 - DNA, 33 bp, Homo sapien
agtagaaaaatattggtaaattgcagtgtattg

SEQ ID NO: 1054109 - DNA, 33 bp, Homo sapien
tgcatacctaaaattacaaccattgaatctttc

SEQ ID NO: 1054110 - DNA, 33 bp, Homo sapien
tgcatacctaaaattataaccattgaatctttc

SEQ ID NO: 1054111 - DNA, 33 bp, Homo sapien
aatactgatgttaaccggcccctgagtatatat

SEQ ID NO: 1054112 - DNA, 33 bp, Homo sapien
aatactgatgttaacctgcccctgagtatatat

SEQ ID NO: 1054113 - DNA, 33 bp, Homo sapien
atttgcatgcagttcacgagagttatatcatta

SEQ ID NO: 1054114 - DNA, 33 bp, Homo sapien
atttgcatgcagttcatgagagttatatcatta

SEQ ID NO: 1054115 - DNA, 33 bp, Homo sapien
tgtctttgcttccaaacgatgtcaccattattt

SEQ ID NO: 1054116 - DNA, 33 bp, Homo sapien
tgtctttgcttccaaaggatgtcaccattattt

SEQ ID NO: 1054117 - DNA, 33 bp, Homo sapien
gaagagactgcttttcccacaatctatgttctt

SEQ ID NO: 1054118 - DNA, 33 bp, Homo sapien
gaagagactgcttttctcacaatctatgttctt

SEQ ID NO: 1054119 - DNA, 33 bp, Homo sapien
catgggatatcgttcaatctaccaaacatttaa

SEQ ID NO: 1054120 - DNA, 33 bp, Homo sapien
catgggatatcgttcagtctaccaaacatttaa

SEQ ID NO: 1054121 - DNA, 33 bp, Homo sapien
gaatactttgatcaaaattggtattcattattc

SEQ ID NO: 1054122 - DNA, 33 bp, Homo sapien
gaatactttgatcaaatttggtattcattattc

SEQ ID NO: 1054123 - DNA, 33 bp, Homo sapien
gccaagatttggcattcaactaattagaaaaaa

SEQ ID NO: 1054124 - DNA, 33 bp, Homo sapien
gccaagatttggcattgaactaattagaaaaaa

SEQ ID NO: 1054125 - DNA, 33 bp, Homo sapien
aaaaatgggttgtgtcaaagatacaacagaagt

SEQ ID NO: 1054126 - DNA, 33 bp, Homo sapien
aaaaatgggttgtgtcgaagatacaacagaagt

SEQ ID NO: 1054127 - DNA, 33 bp, Homo sapien
taagcctatatttaaaaaagcaccaaatgtgtg

SEQ ID NO: 1054128 - DNA, 33 bp, Homo sapien
taagcctatatttaaacaagcaccaaatgtgtg

SEQ ID NO: 1054129 - DNA, 33 bp, Homo sapien
tttgacctgcgtaagactactagcagctctgct

SEQ ID NO: 1054130 - DNA, 33 bp, Homo sapien
tttgacctgcgtaagagtactagcagctctgct

SEQ ID NO: 1054131 - DNA, 33 bp, Homo sapien
cttaagaaattcagacacatattgttagcttat

SEQ ID NO: 1054132 - DNA, 33 bp, Homo sapien
cttaagaaattcagacgcatattgttagcttat

SEQ ID NO: 1054133 - DNA, 33 bp, Homo sapien
cagggaaacaaaattacgggaagtagttggaag

SEQ ID NO: 1054134 - DNA, 33 bp, Homo sapien
cagggaaacaaaattatgggaagtagttggaag

SEQ ID NO: 1054135 - DNA, 33 bp, Homo sapien
ttgctagaatggaagcactcactgcctttgttc

SEQ ID NO: 1054136 - DNA, 33 bp, Homo sapien
ttgctagaatggaagcgctcactgcctttgttc

SEQ ID NO: 1054137 - DNA, 33 bp, Homo sapien
gcatggatgaacctcaaaggaccaaatatatca

SEQ ID NO: 1054138 - DNA, 33 bp, Homo sapien
gcatggatgaacctcagaggaccaaatatatca

SEQ ID NO: 1054139 - DNA, 33 bp, Homo sapien
ggctatggcattaaagcctcctaacgtgaaaag

SEQ ID NO: 1054140 - DNA, 33 bp, Homo sapien
ggctatggcattaaagtctcctaacgtgaaaag

SEQ ID NO: 1054141 - DNA, 33 bp, Homo sapien
ccattgggtatgttaacggtgcttgtcaatgga

SEQ ID NO: 1054142 - DNA, 33 bp, Homo sapien
ccattgggtatgttaagggtgcttgtcaatgga

SEQ ID NO: 1054143 - DNA, 33 bp, Homo sapien
tatgtgtatatgtttcgatcagagacacatact

SEQ ID NO: 1054144 - DNA, 33 bp, Homo sapien
tatgtgtatatgtttctatcagagacacatact

SEQ ID NO: 1054145 - DNA, 33 bp, Homo sapien
atcaaattttgccttaagatagaatatagtatg

SEQ ID NO: 1054146 - DNA, 33 bp, Homo sapien
atcaaattttgccttaggatagaatatagtatg

SEQ ID NO: 1054147 - DNA, 33 bp, Homo sapien
gttatattttatgagaactgtggatatatctag

SEQ ID NO: 1054148 - DNA, 33 bp, Homo sapien
gttatattttatgagagctgtggatatatctag

SEQ ID NO: 1054149 - DNA, 33 bp, Homo sapien
tctttccttgacaataataaggcaccaaagaaa

SEQ ID NO: 1054150 - DNA, 33 bp, Homo sapien
tctttccttgacaatagtaaggcaccaaagaaa

SEQ ID NO: 1054151 - DNA, 33 bp, Homo sapien
gggaagtgctaaacaactgacagaggttttcac

SEQ ID NO: 1054152 - DNA, 33 bp, Homo sapien
gggaagtgctaaacaattgacagaggttttcac

SEQ ID NO: 1054153 - DNA, 33 bp, Homo sapien
ctttagaattctcttaataacttggcaaaatcg

SEQ ID NO: 1054154 - DNA, 33 bp, Homo sapien
ctttagaattctcttagtaacttggcaaaatcg

SEQ ID NO: 1054155 - DNA, 33 bp, Homo sapien
aatcttccaagcaaaaagatacttctcctatgg

SEQ ID NO: 1054156 - DNA, 33 bp, Homo sapien
aatcttccaagcaaaacgatacttctcctatgg

SEQ ID NO: 1054157 - DNA, 33 bp, Homo sapien
cacccccaagattgaacgacctgaaatgcagta

SEQ ID NO: 1054158 - DNA, 33 bp, Homo sapien
cacccccaagattgaatgacctgaaatgcagta

SEQ ID NO: 1054159 - DNA, 33 bp, Homo sapien
atccttgacctcttcaatcattacactctattt

SEQ ID NO: 1054160 - DNA, 33 bp, Homo sapien
atccttgacctcttcagtcattacactctattt

SEQ ID NO: 1054161 - DNA, 33 bp, Homo sapien
ttgcaatttaccaacagaatggagataacaaag

SEQ ID NO: 1054162 - DNA, 33 bp, Homo sapien
ttgcaatttaccaacataatggagataacaaag

SEQ ID NO: 1054163 - DNA, 33 bp, Homo sapien
gtcattagatagatagaaaggtcgatagataca

SEQ ID NO: 1054164 - DNA, 33 bp, Homo sapien
gtcattagatagataggaaggtcgatagataca

SEQ ID NO: 1054165 - DNA, 33 bp, Homo sapien
gaaagtctgagaaaccaaacgatattgagtact

SEQ ID NO: 1054166 - DNA, 33 bp, Homo sapien
gaaagtctgagaaaccgaacgatattgagtact

SEQ ID NO: 1054167 - DNA, 33 bp, Homo sapien
ccacttccaaattcacgctctatccttcttcat

SEQ ID NO: 1054168 - DNA, 33 bp, Homo sapien
ccacttccaaattcactctctatccttcttcat

SEQ ID NO: 1054169 - DNA, 33 bp, Homo sapien
ccccatcaatttcaaacgaccagaggtagggga

SEQ ID NO: 1054170 - DNA, 33 bp, Homo sapien
ccccatcaatttcaaatgaccagaggtagggga

SEQ ID NO: 1054171 - DNA, 33 bp, Homo sapien
gaacaggttttggtatcaaacaaactctcactc

SEQ ID NO: 1054172 - DNA, 33 bp, Homo sapien
gaacaggttttggtatgaaacaaactctcactc

SEQ ID NO: 1054173 - DNA, 33 bp, Homo sapien
gtgagaataacaattcactgtttgcatttgacc

SEQ ID NO: 1054174 - DNA, 33 bp, Homo sapien
gtgagaataacaattcgctgtttgcatttgacc

SEQ ID NO: 1054175 - DNA, 33 bp, Homo sapien
ctaccttcttcagtaaactaagccaatccaggt

SEQ ID NO: 1054176 - DNA, 33 bp, Homo sapien
ctaccttcttcagtaagctaagccaatccaggt

SEQ ID NO: 1054177 - DNA, 33 bp, Homo sapien
gacagtgatgtttagacatctgattaccacaac

SEQ ID NO: 1054178 - DNA, 33 bp, Homo sapien
gacagtgatgtttagatatctgattaccacaac

SEQ ID NO: 1054179 - DNA, 33 bp, Homo sapien
cagcacgggttgcaccaaactacgcccctgatg

SEQ ID NO: 1054180 - DNA, 33 bp, Homo sapien
cagcacgggttgcaccgaactacgcccctgatg

SEQ ID NO: 1054181 - DNA, 33 bp, Homo sapien
ggaggcatttgaatgcacttgctgttatattga

SEQ ID NO: 1054182 - DNA, 33 bp, Homo sapien
ggaggcatttgaatgctcttgctgttatattga

SEQ ID NO: 1054183 - DNA, 33 bp, Homo sapien
aagctgggtctctccaatgaaggaagtctgagt

SEQ ID NO: 1054184 - DNA, 33 bp, Homo sapien
aagctgggtctctccagtgaaggaagtctgagt

SEQ ID NO: 1054185 - DNA, 33 bp, Homo sapien
gggtagttgttaagtacagcagttgggcaagat

SEQ ID NO: 1054186 - DNA, 33 bp, Homo sapien
gggtagttgttaagtatagcagttgggcaagat

SEQ ID NO: 1054187 - DNA, 33 bp, Homo sapien
aaaatccccaaacatacgtagattgaacaacat

SEQ ID NO: 1054188 - DNA, 33 bp, Homo sapien
aaaatccccaaacatatgtagattgaacaacat

SEQ ID NO: 1054189 - DNA, 33 bp, Homo sapien
ccgagctcaggctgcaacttacttccaactctg

SEQ ID NO: 1054190 - DNA, 33 bp, Homo sapien
ccgagctcaggctgcaccttacttccaactctg

SEQ ID NO: 1054191 - DNA, 33 bp, Homo sapien
tgacagcacttttcagactcaggcgaccggctc

SEQ ID NO: 1054192 - DNA, 33 bp, Homo sapien
tgacagcacttttcaggctcaggcgaccggctc

SEQ ID NO: 1054193 - DNA, 33 bp, Homo sapien
tcctatagcctctgaacgtgcctttcccctctg

SEQ ID NO: 1054194 - DNA, 33 bp, Homo sapien
tcctatagcctctgaatgtgcctttcccctctg

SEQ ID NO: 1054195 - DNA, 33 bp, Homo sapien
ttatgtgttttagaaacggtctctgtggcccag

SEQ ID NO: 1054196 - DNA, 33 bp, Homo sapien
ttatgtgttttagaaatggtctctgtggcccag

SEQ ID NO: 1054197 - DNA, 33 bp, Homo sapien
aaggtcagcagctagaagatttccaggtttctc

SEQ ID NO: 1054198 - DNA, 33 bp, Homo sapien
aaggtcagcagctagaggatttccaggtttctc

SEQ ID NO: 1054199 - DNA, 33 bp, Homo sapien
atgtatgattgtatgaaaaaatgtatttaaatg

SEQ ID NO: 1054200 - DNA, 33 bp, Homo sapien
atgtatgattgtatgacaaaatgtatttaaatg

SEQ ID NO: 1054201 - DNA, 33 bp, Homo sapien
agcaaaaatctctgggaatttcaggactacata

SEQ ID NO: 1054202 - DNA, 33 bp, Homo sapien
agcaaaaatctctgggcatttcaggactacata

SEQ ID NO: 1054203 - DNA, 33 bp, Homo sapien
tgatttgaaatcatagaccctccattgagtata

SEQ ID NO: 1054204 - DNA, 33 bp, Homo sapien
tgatttgaaatcataggccctccattgagtata

SEQ ID NO: 1054205 - DNA, 33 bp, Homo sapien
gaaaagaaaatgaacacggattggatgaacata

SEQ ID NO: 1054206 - DNA, 33 bp, Homo sapien
gaaaagaaaatgaacatggattggatgaacata

SEQ ID NO: 1054207 - DNA, 33 bp, Homo sapien
agaatttagtttgagacctactggtattaagat

SEQ ID NO: 1054208 - DNA, 33 bp, Homo sapien
agaatttagtttgagatctactggtattaagat

SEQ ID NO: 1054209 - DNA, 33 bp, Homo sapien
ggcttttacataggcaaggatttaggtatatat

SEQ ID NO: 1054210 - DNA, 33 bp, Homo sapien
ggcttttacataggcatggatttaggtatatat

SEQ ID NO: 1054211 - DNA, 33 bp, Homo sapien
aacactattggaccctaaaaatctggcaagaga

SEQ ID NO: 1054212 - DNA, 33 bp, Homo sapien
aacactattggaccctgaaaatctggcaagaga

SEQ ID NO: 1054213 - DNA, 33 bp, Homo sapien
tgaaattgatatgttaaacatcaaaatgcaatt

SEQ ID NO: 1054214 - DNA, 33 bp, Homo sapien
tgaaattgatatgttagacatcaaaatgcaatt

SEQ ID NO: 1054215 - DNA, 33 bp, Homo sapien
aaatgtgactcctccacgaaagtgccttattat

SEQ ID NO: 1054216 - DNA, 33 bp, Homo sapien
aaatgtgactcctccatgaaagtgccttattat

SEQ ID NO: 1054217 - DNA, 33 bp, Homo sapien
caattggtgttttccaatgattcaacagaatta

SEQ ID NO: 1054218 - DNA, 33 bp, Homo sapien
caattggtgttttccagtgattcaacagaatta

SEQ ID NO: 1054219 - DNA, 33 bp, Homo sapien
tgaaattatgctgtacgacaccgtaatggtgga

SEQ ID NO: 1054220 - DNA, 33 bp, Homo sapien
tgaaattatgctgtactacaccgtaatggtgga

SEQ ID NO: 1054221 - DNA, 33 bp, Homo sapien
gcaaggttgcagagatcagtgaacacttaatac

SEQ ID NO: 1054222 - DNA, 33 bp, Homo sapien
gcaaggttgcagagattagtgaacacttaatac

SEQ ID NO: 1054223 - DNA, 33 bp, Homo sapien
atagcctgaaaggaaactcgggcagtggacacc

SEQ ID NO: 1054224 - DNA, 33 bp, Homo sapien
atagcctgaaaggaaattcgggcagtggacacc

SEQ ID NO: 1054225 - DNA, 33 bp, Homo sapien
tttatagcaagacttaagaaaattcgtttggac

SEQ ID NO: 1054226 - DNA, 33 bp, Homo sapien
tttatagcaagacttacgaaaattcgtttggac

SEQ ID NO: 1054227 - DNA, 33 bp, Homo sapien
gattaggctcgcaggaacataaaaaagtgagga

SEQ ID NO: 1054228 - DNA, 33 bp, Homo sapien
gattaggctcgcaggagcataaaaaagtgagga

SEQ ID NO: 1054229 - DNA, 33 bp, Homo sapien
tctaatctcattcttgaaaccttgttattaact

SEQ ID NO: 1054230 - DNA, 33 bp, Homo sapien
tctaatctcattcttggaaccttgttattaact

SEQ ID NO: 1054231 - DNA, 33 bp, Homo sapien
ttctattatgaggaaaatcccctcttctctacc

SEQ ID NO: 1054232 - DNA, 33 bp, Homo sapien
ttctattatgaggaaactcccctcttctctacc

SEQ ID NO: 1054233 - DNA, 33 bp, Homo sapien
cttatttttcccagaacttctcttcacctggtt

SEQ ID NO: 1054234 - DNA, 33 bp, Homo sapien
cttatttttcccagaatttctcttcacctggtt

SEQ ID NO: 1054235 - DNA, 33 bp, Homo sapien
aaaattatgagtgatgaagaaaattctgtcctt

SEQ ID NO: 1054236 - DNA, 33 bp, Homo sapien
aaaattatgagtgatgtagaaaattctgtcctt

SEQ ID NO: 1054237 - DNA, 33 bp, Homo sapien
aaaaagcctagactgccaaaaatagagcattaa

SEQ ID NO: 1054238 - DNA, 33 bp, Homo sapien
aaaaagcctagactgctaaaaatagagcattaa

SEQ ID NO: 1054239 - DNA, 33 bp, Homo sapien
acgatttccaatcaaaattatgtgagaccttac

SEQ ID NO: 1054240 - DNA, 33 bp, Homo sapien
acgatttccaatcaaagttatgtgagaccttac

SEQ ID NO: 1054241 - DNA, 33 bp, Homo sapien
ttagtcttcatcattccattggtttaattattt

SEQ ID NO: 1054242 - DNA, 33 bp, Homo sapien
ttagtcttcatcattctattggtttaattattt

SEQ ID NO: 1054243 - DNA, 33 bp, Homo sapien
gaggtacaagacatcacggtttttgtgcacagg

SEQ ID NO: 1054244 - DNA, 33 bp, Homo sapien
gaggtacaagacatcagggtttttgtgcacagg

SEQ ID NO: 1054245 - DNA, 33 bp, Homo sapien
gtattatggaaattaaatgctagactgtggatt

SEQ ID NO: 1054246 - DNA, 33 bp, Homo sapien
gtattatggaaattaagtgctagactgtggatt

SEQ ID NO: 1054247 - DNA, 33 bp, Homo sapien
caaatagagtttcatcaaggaaaaatgtagctg

SEQ ID NO: 1054248 - DNA, 33 bp, Homo sapien
caaatagagtttcatcgaggaaaaatgtagctg

SEQ ID NO: 1054249 - DNA, 33 bp, Homo sapien
tattaaaagtttattacgtgattctattcaata

SEQ ID NO: 1054250 - DNA, 33 bp, Homo sapien
tattaaaagtttattatgtgattctattcaata

SEQ ID NO: 1054251 - DNA, 33 bp, Homo sapien
gtatggacacaggtcacctgtcgatacatctgt

SEQ ID NO: 1054252 - DNA, 33 bp, Homo sapien
gtatggacacaggtcagctgtcgatacatctgt

SEQ ID NO: 1054253 - DNA, 33 bp, Homo sapien
tcgtgctaaggaaatcaaagacgtggacacaca

SEQ ID NO: 1054254 - DNA, 33 bp, Homo sapien
tcgtgctaaggaaatcgaagacgtggacacaca

SEQ ID NO: 1054255 - DNA, 33 bp, Homo sapien
cttactgaatgagaaacttcaaggtgggatctt

SEQ ID NO: 1054256 - DNA, 33 bp, Homo sapien
cttactgaatgagaaagttcaaggtgggatctt

SEQ ID NO: 1054257 - DNA, 33 bp, Homo sapien
aatgaactgcaaaattaaaaaattactcaaaga

SEQ ID NO: 1054258 - DNA, 33 bp, Homo sapien
aatgaactgcaaaatttaaaaattactcaaaga

SEQ ID NO: 1054259 - DNA, 33 bp, Homo sapien
ctaatgttgagtttatcagagtagtattaggtt

SEQ ID NO: 1054260 - DNA, 33 bp, Homo sapien
ctaatgttgagtttattagagtagtattaggtt

SEQ ID NO: 1054261 - DNA, 33 bp, Homo sapien
aggacaagctttcaaagtcagtctcagtgctgc

SEQ ID NO: 1054262 - DNA, 33 bp, Homo sapien
aggacaagctttcaaattcagtctcagtgctgc

SEQ ID NO: 1054263 - DNA, 33 bp, Homo sapien
cacagggcatagagcaaaatagagaaggtgggg

SEQ ID NO: 1054264 - DNA, 33 bp, Homo sapien
cacagggcatagagcacaatagagaaggtgggg

SEQ ID NO: 1054265 - DNA, 33 bp, Homo sapien
gaaactgtcattttggcagatcagatagttgta

SEQ ID NO: 1054266 - DNA, 33 bp, Homo sapien
gaaactgtcattttggtagatcagatagttgta

SEQ ID NO: 1054267 - DNA, 33 bp, Homo sapien
tgtctcttggctaatacatacagaagtcaaaga

SEQ ID NO: 1054268 - DNA, 33 bp, Homo sapien
tgtctcttggctaatatatacagaagtcaaaga

SEQ ID NO: 1054269 - DNA, 33 bp, Homo sapien
aaatatttgggcagggaaagtttcagttcaaat

SEQ ID NO: 1054270 - DNA, 33 bp, Homo sapien
aaatatttgggcagggtaagtttcagttcaaat

SEQ ID NO: 1054271 - DNA, 33 bp, Homo sapien
ataatgttgttctggaaagaaacagtggtaatt

SEQ ID NO: 1054272 - DNA, 33 bp, Homo sapien
ataatgttgttctggagagaaacagtggtaatt

SEQ ID NO: 1054273 - DNA, 33 bp, Homo sapien
tattgttaatgctctacgttgaagtatatactc

SEQ ID NO: 1054274 - DNA, 33 bp, Homo sapien
tattgttaatgctctatgttgaagtatatactc

SEQ ID NO: 1054275 - DNA, 33 bp, Homo sapien
ttcagtttatttggagaaaaggatataataggg

SEQ ID NO: 1054276 - DNA, 33 bp, Homo sapien
ttcagtttatttggagtaaaggatataataggg

SEQ ID NO: 1054277 - DNA, 33 bp, Homo sapien
gaagatcagatcaaaacttgtgatccactgtac

SEQ ID NO: 1054278 - DNA, 33 bp, Homo sapien
gaagatcagatcaaaagttgtgatccactgtac

SEQ ID NO: 1054279 - DNA, 33 bp, Homo sapien
gtttgattacaaaaagaatgatgtccaaataat

SEQ ID NO: 1054280 - DNA, 33 bp, Homo sapien
gtttgattacaaaaaggatgatgtccaaataat

SEQ ID NO: 1054281 - DNA, 33 bp, Homo sapien
ggctggtaacattgctcaaaaaggtgtcttgaa

SEQ ID NO: 1054282 - DNA, 33 bp, Homo sapien
ggctggtaacattgcttaaaaaggtgtcttgaa

SEQ ID NO: 1054283 - DNA, 33 bp, Homo sapien
ctgagaacaaaatagacaaggtcactcctctcc

SEQ ID NO: 1054284 - DNA, 33 bp, Homo sapien
ctgagaacaaaatagagaaggtcactcctctcc

SEQ ID NO: 1054285 - DNA, 33 bp, Homo sapien
attatgttcaaggctagaaaataatacattaaa

SEQ ID NO: 1054286 - DNA, 33 bp, Homo sapien
attatgttcaaggctataaaataatacattaaa

SEQ ID NO: 1054287 - DNA, 33 bp, Homo sapien
tatggacttgggttgacatatgagaacatggaa

SEQ ID NO: 1054288 - DNA, 33 bp, Homo sapien
tatggacttgggttgatatatgagaacatggaa

SEQ ID NO: 1054289 - DNA, 33 bp, Homo sapien
cgagaagctgaacttccaaccaattacctcaga

SEQ ID NO: 1054290 - DNA, 33 bp, Homo sapien
cgagaagctgaacttcgaaccaattacctcaga

SEQ ID NO: 1054291 - DNA, 33 bp, Homo sapien
tatattggtatgtccagggaattgggttattta

SEQ ID NO: 1054292 - DNA, 33 bp, Homo sapien
tatattggtatgtccatggaattgggttattta

SEQ ID NO: 1054293 - DNA, 33 bp, Homo sapien
ataattgatgtgttaccgatcaggttattccta

SEQ ID NO: 1054294 - DNA, 33 bp, Homo sapien
ataattgatgtgttactgatcaggttattccta

SEQ ID NO: 1054295 - DNA, 33 bp, Homo sapien
tcagtcagctcagatcaaggaaattaacatctc

SEQ ID NO: 1054296 - DNA, 33 bp, Homo sapien
tcagtcagctcagatccaggaaattaacatctc

SEQ ID NO: 1054297 - DNA, 33 bp, Homo sapien
aagacttttttatacaaaccagaagaacgaatg

SEQ ID NO: 1054298 - DNA, 33 bp, Homo sapien
aagacttttttatacagaccagaagaacgaatg

SEQ ID NO: 1054299 - DNA, 33 bp, Homo sapien
agattcactctgtcaaaaactttatcaaatgac

SEQ ID NO: 1054300 - DNA, 33 bp, Homo sapien
agattcactctgtcaacaactttatcaaatgac

SEQ ID NO: 1054301 - DNA, 33 bp, Homo sapien
tctgcttcaagcttctaaacagtatctcctaca

SEQ ID NO: 1054302 - DNA, 33 bp, Homo sapien
tctgcttcaagcttctcaacagtatctcctaca

SEQ ID NO: 1054303 - DNA, 33 bp, Homo sapien
ctaagttatatatcaacgtggaagtgtgcattc

SEQ ID NO: 1054304 - DNA, 33 bp, Homo sapien
ctaagttatatatcaatgtggaagtgtgcattc

SEQ ID NO: 1054305 - DNA, 33 bp, Homo sapien; identical to SEQ ID NO: 1054303

SEQ ID NO: 1054306 - DNA, 33 bp, Homo sapien; identical to SEQ ID NO: 1054304

SEQ ID NO: 1054307 - DNA, 33 bp, Homo sapien
atatatatacagcaaacgttttagatctaaagg

SEQ ID NO: 1054308 - DNA, 33 bp, Homo sapien
atatatatacagcaaatgttttagatctaaagg

SEQ ID NO: 1054309 - DNA, 33 bp, Homo sapien
aatgaaattataattcactagtcagataatcaa

SEQ ID NO: 1054310 - DNA, 33 bp, Homo sapien
aatgaaattataattcgctagtcagataatcaa

SEQ ID NO: 1054311 - DNA, 33 bp, Homo sapien
gtgataattatgctgaagtaaaattaagtataa

SEQ ID NO: 1054312 - DNA, 33 bp, Homo sapien
gtgataattatgctgacgtaaaattaagtataa

SEQ ID NO: 1054313 - DNA, 33 bp, Homo sapien
cttcagagcttacataacagatacgtggatttg

SEQ ID NO: 1054314 - DNA, 33 bp, Homo sapien
cttcagagcttacatatcagatacgtggatttg

SEQ ID NO: 1054315 - DNA, 33 bp, Homo sapien
aaatcacaaaaaatgcaatgttatgccctttga

SEQ ID NO: 1054316 - DNA, 33 bp, Homo sapien
aaatcacaaaaaatgcgatgttatgccctttga

SEQ ID NO: 1054317 - DNA, 33 bp, Homo sapien
aaaaactggtaaaaaccctatgtcagctggatg

SEQ ID NO: 1054318 - DNA, 33 bp, Homo sapien
aaaaactggtaaaaactctatgtcagctggatg

SEQ ID NO: 1054319 - DNA, 33 bp, Homo sapien
gccagcatatgaaggaaacactagaaacaggtg

SEQ ID NO: 1054320 - DNA, 33 bp, Homo sapien
gccagcatatgaaggagacactagaaacaggtg

SEQ ID NO: 1054321 - DNA, 33 bp, Homo sapien
aaatctcacatgaagaatctcagcagtataatc

SEQ ID NO: 1054322 - DNA, 33 bp, Homo sapien
aaatctcacatgaagagtctcagcagtataatc

SEQ ID NO: 1054323 - DNA, 33 bp, Homo sapien
aaaattcacaatcttacgcttctaaattatgga

SEQ ID NO: 1054324 - DNA, 33 bp, Homo sapien
aaaattcacaatcttatgcttctaaattatgga

SEQ ID NO: 1054325 - DNA, 33 bp, Homo sapien
aaattgcttttggatccagttatttcggttgta

SEQ ID NO: 1054326 - DNA, 33 bp, Homo sapien
aaattgcttttggatctagttatttcggttgta

SEQ ID NO: 1054327 - DNA, 33 bp, Homo sapien
agagaaatataaaaaaatgcagactttcctata

SEQ ID NO: 1054328 - DNA, 33 bp, Homo sapien
agagaaatataaaaaactgcagactttcctata

SEQ ID NO: 1054329 - DNA, 33 bp, Homo sapien
tagatgttgataatgacacatttaaaaatctat

SEQ ID NO: 1054330 - DNA, 33 bp, Homo sapien
tagatgttgataatgagacatttaaaaatctat

SEQ ID NO: 1054331 - DNA, 33 bp, Homo sapien
atctgagaaatcaaaaacatatgtctgtctcac

SEQ ID NO: 1054332 - DNA, 33 bp, Homo sapien
atctgagaaatcaaaagcatatgtctgtctcac

SEQ ID NO: 1054333 - DNA, 33 bp, Homo sapien
cattctcaatactttgaagctatggcacataat

SEQ ID NO: 1054334 - DNA, 33 bp, Homo sapien
cattctcaatactttgcagctatggcacataat

SEQ ID NO: 1054335 - DNA, 33 bp, Homo sapien
ttcaatctgatagccccgctccttatatgttgc

SEQ ID NO: 1054336 - DNA, 33 bp, Homo sapien
ttcaatctgatagccctgctccttatatgttgc

SEQ ID NO: 1054337 - DNA, 33 bp, Homo sapien
atgcccagccgaatttgaaaaactagagacaaa

SEQ ID NO: 1054338 - DNA, 33 bp, Homo sapien
atgcccagccgaattttaaaaactagagacaaa

SEQ ID NO: 1054339 - DNA, 33 bp, Homo sapien
atggcatagcagtttacggtatataggatgcct

SEQ ID NO: 1054340 - DNA, 33 bp, Homo sapien
atggcatagcagtttatggtatataggatgcct

SEQ ID NO: 1054341 - DNA, 33 bp, Homo sapien
acaaaataagttttttaaaatgatcaggaagtg

SEQ ID NO: 1054342 - DNA, 33 bp, Homo sapien
acaaaataagtttttttaaatgatcaggaagtg

SEQ ID NO: 1054343 - DNA, 33 bp, Homo sapien
cctggcccatcagtgaagtcttatcatgcattg

SEQ ID NO: 1054344 - DNA, 33 bp, Homo sapien
cctggcccatcagtgaggtcttatcatgcattg

SEQ ID NO: 1054345 - DNA, 33 bp, Homo sapien
ttatcatgaacatacaaatttgcagttgacaca

SEQ ID NO: 1054346 - DNA, 33 bp, Homo sapien
ttatcatgaacatacagatttgcagttgacaca

SEQ ID NO: 1054347 - DNA, 33 bp, Homo sapien
atgtttcttacaatgtcaatcttcatcggtaca

SEQ ID NO: 1054348 - DNA, 33 bp, Homo sapien
atgtttcttacaatgttaatcttcatcggtaca

SEQ ID NO: 1054349 - DNA, 33 bp, Homo sapien
tggattattggttagaaattctagattgaaatg

SEQ ID NO: 1054350 - DNA, 33 bp, Homo sapien
tggattattggttagagattctagattgaaatg

SEQ ID NO: 1054351 - DNA, 33 bp, Homo sapien
agaatttaggtcttcacggagtgcctacgtcct

SEQ ID NO: 1054352 - DNA, 33 bp, Homo sapien
agaatttaggtcttcatggagtgcctacgtcct

SEQ ID NO: 1054353 - DNA, 33 bp, Homo sapien
aattctgcattctcggaaaagatatttgaaaac

SEQ ID NO: 1054354 - DNA, 33 bp, Homo sapien
aattctgcattctcgggaaagatatttgaaaac

SEQ ID NO: 1054355 - DNA, 33 bp, Homo sapien
cctttttgttgcataacgatctcaggaaataac

SEQ ID NO: 1054356 - DNA, 33 bp, Homo sapien
cctttttgttgcataatgatctcaggaaataac

SEQ ID NO: 1054357 - DNA, 33 bp, Homo sapien
caatgtttttatgagacctaaccacattagaca

SEQ ID NO: 1054358 - DNA, 33 bp, Homo sapien
caatgtttttatgagatctaaccacattagaca

SEQ ID NO: 1054359 - DNA, 33 bp, Homo sapien
cagccacttaattcaacgccctttacacaggga

SEQ ID NO: 1054360 - DNA, 33 bp, Homo sapien
cagccacttaattcaatgccctttacacaggga

SEQ ID NO: 1054361 - DNA, 33 bp, Homo sapien
ggctgatttcacgctacggaattgtggaaagat

SEQ ID NO: 1054362 - DNA, 33 bp, Homo sapien
ggctgatttcacgctatggaattgtggaaagat

SEQ ID NO: 1054363 - DNA, 33 bp, Homo sapien
actctcatgtattaagcaaggaatttagtacac

SEQ ID NO: 1054364 - DNA, 33 bp, Homo sapien
actctcatgtattaaggaaggaatttagtacac

SEQ ID NO: 1054365 - DNA, 33 bp, Homo sapien
ttaaaacggcttgtagcagaactgtgataaaaa

SEQ ID NO: 1054366 - DNA, 33 bp, Homo sapien
ttaaaacggcttgtaggagaactgtgataaaaa

SEQ ID NO: 1054367 - DNA, 33 bp, Homo sapien
taatgctttgtaactacgggtctaaggagttct

SEQ ID NO: 1054368 - DNA, 33 bp, Homo sapien
taatgctttgtaactatgggtctaaggagttct

SEQ ID NO: 1054369 - DNA, 33 bp, Homo sapien
gttctcatgcaactgaagtttctattgattagt

SEQ ID NO: 1054370 - DNA, 33 bp, Homo sapien
gttctcatgcaactgatgtttctattgattagt

SEQ ID NO: 1054371 - DNA, 33 bp, Homo sapien
aatttgcactgaaaagaaagtgtttgctagatt

SEQ ID NO: 1054372 - DNA, 33 bp, Homo sapien
aatttgcactgaaaaggaagtgtttgctagatt

SEQ ID NO: 1054373 - DNA, 33 bp, Homo sapien
ctgtcttctataaggaccatataaacccttatg

SEQ ID NO: 1054374 - DNA, 33 bp, Homo sapien
ctgtcttctataaggatcatataaacccttatg

SEQ ID NO: 1054375 - DNA, 33 bp, Homo sapien
aattgttattgtcgccaccattttctccaatct

SEQ ID NO: 1054376 - DNA, 33 bp, Homo sapien
aattgttattgtcgccgccattttctccaatct

SEQ ID NO: 1054377 - DNA, 33 bp, Homo sapien
cagcagagcagcctccacactggcatactcagg

SEQ ID NO: 1054378 - DNA, 33 bp, Homo sapien
cagcagagcagcctccgcactggcatactcagg

SEQ ID NO: 1054379 - DNA, 33 bp, Homo sapien
aatgtctgacttgcataaataggtcctctcctt

SEQ ID NO: 1054380 - DNA, 33 bp, Homo sapien
aatgtctgacttgcatcaataggtcctctcctt

SEQ ID NO: 1054381 - DNA, 33 bp, Homo sapien
tgtgttaataatttgccgaggataatggcttcc

SEQ ID NO: 1054382 - DNA, 33 bp, Homo sapien
tgtgttaataatttgctgaggataatggcttcc

SEQ ID NO: 1054383 - DNA, 33 bp, Homo sapien
gaagggaaaacattcaataaattgtacataact

SEQ ID NO: 1054384 - DNA, 33 bp, Homo sapien
gaagggaaaacattcagtaaattgtacataact

SEQ ID NO: 1054385 - DNA, 33 bp, Homo sapien
atatatatttttacaacggataatgctgaagtt

SEQ ID NO: 1054386 - DNA, 33 bp, Homo sapien
atatatatttttacaatggataatgctgaagtt

SEQ ID NO: 1054387 - DNA, 33 bp, Homo sapien
cactaatggtagataaagcacacatataccctg

SEQ ID NO: 1054388 - DNA, 33 bp, Homo sapien
cactaatggtagataaggcacacatataccctg

SEQ ID NO: 1054389 - DNA, 33 bp, Homo sapien
tcaccttatcattgcaggtctacccttttatgg

SEQ ID NO: 1054390 - DNA, 33 bp, Homo sapien
tcaccttatcattgcatgtctacccttttatgg

SEQ ID NO: 1054391 - DNA, 33 bp, Homo sapien
cacaagtacaccaataagcatgtgcaataatcc

SEQ ID NO: 1054392 - DNA, 33 bp, Homo sapien
cacaagtacaccaataggcatgtgcaataatcc

SEQ ID NO: 1054393 - DNA, 33 bp, Homo sapien
agaagctggctttaagaaaaacagtaatgaaga

SEQ ID NO: 1054394 - DNA, 33 bp, Homo sapien
agaagctggctttaagtaaaacagtaatgaaga

SEQ ID NO: 1054395 - DNA, 33 bp, Homo sapien
gaactctctcatagacggaaaagatggtattgt

SEQ ID NO: 1054396 - DNA, 33 bp, Homo sapien
gaactctctcatagactgaaaagatggtattgt

SEQ ID NO: 1054397 - DNA, 33 bp, Homo sapien
atattttgaggcgttgcaaattaaatgcataat

SEQ ID NO: 1054398 - DNA, 33 bp, Homo sapien
atattttgaggcgttgtaaattaaatgcataat

SEQ ID NO: 1054399 - DNA, 33 bp, Homo sapien
taatatgccactgttaccataatggaaaaattt

SEQ ID NO: 1054400 - DNA, 33 bp, Homo sapien
taatatgccactgttatcataatggaaaaattt

SEQ ID NO: 1054401 - DNA, 33 bp, Homo sapien
cattggttgtctaaaactgggggaaatgaaagc

SEQ ID NO: 1054402 - DNA, 33 bp, Homo sapien
cattggttgtctaaaattgggggaaatgaaagc

SEQ ID NO: 1054403 - DNA, 33 bp, Homo sapien; identical to SEQ ID NO: 1054401

SEQ ID NO: 1054404 - DNA, 33 bp, Homo sapien; identical to SEQ ID NO: 1054402

SEQ ID NO: 1054405 - DNA, 33 bp, Homo sapien; identical to SEQ ID NO: 1054401

SEQ ID NO: 1054406 - DNA, 33 bp, Homo sapien; identical to SEQ ID NO: 1054402

SEQ ID NO: 1054407 - DNA, 33 bp, Homo sapien
aagaggacaacccagaagagtttgtaaagcact

SEQ ID NO: 1054408 - DNA, 33 bp, Homo sapien
aagaggacaacccagaggagtttgtaaagcact

SEQ ID NO: 1054409 - DNA, 33 bp, Homo sapien
tgagaatccttgataaccactaatgggagacat

SEQ ID NO: 1054410 - DNA, 33 bp, Homo sapien
tgagaatccttgataatcactaatgggagacat

SEQ ID NO: 1054411 - DNA, 33 bp, Homo sapien
tatatgtatatcaaaaagtcaagtcatacaagt

SEQ ID NO: 1054412 - DNA, 33 bp, Homo sapien
tatatgtatatcaaaacgtcaagtcatacaagt

SEQ ID NO: 1054413 - DNA, 33 bp, Homo sapien
atggaacatatgtgaaagtaaacagtatatgca

SEQ ID NO: 1054414 - DNA, 33 bp, Homo sapien
atggaacatatgtgaacgtaaacagtatatgca

SEQ ID NO: 1054415 - DNA, 33 bp, Homo sapien
atttcttcagttcacaacatgtgcctggtatgg

SEQ ID NO: 1054416 - DNA, 33 bp, Homo sapien
atttcttcagttcacatcatgtgcctggtatgg

SEQ ID NO: 1054417 - DNA, 33 bp, Homo sapien
tacgggtaattagctagaggaaaaaacgactac

SEQ ID NO: 1054418 - DNA, 33 bp, Homo sapien
tacgggtaattagctataggaaaaaacgactac

SEQ ID NO: 1054419 - DNA, 33 bp, Homo sapien
tgactatagtcaataacagcttaattgtatatt

SEQ ID NO: 1054420 - DNA, 33 bp, Homo sapien
tgactatagtcaataatagcttaattgtatatt

SEQ ID NO: 1054421 - DNA, 33 bp, Homo sapien
atactggggtatcataagggcataaagtggtaa

SEQ ID NO: 1054422 - DNA, 33 bp, Homo sapien
atactggggtatcataggggcataaagtggtaa

SEQ ID NO: 1054423 - DNA, 33 bp, Homo sapien
agtcaatgtgaaaccaataacagaaatgaaaca

SEQ ID NO: 1054424 - DNA, 33 bp, Homo sapien
agtcaatgtgaaaccagtaacagaaatgaaaca

SEQ ID NO: 1054425 - DNA, 33 bp, Homo sapien
tggaaggtaagctagaacagtaaaggaaaaaaa

SEQ ID NO: 1054426 - DNA, 33 bp, Homo sapien
tggaaggtaagctagagcagtaaaggaaaaaaa

SEQ ID NO: 1054427 - DNA, 33 bp, Homo sapien
ttggtcctaagttagaagcaggggcaaaattta

SEQ ID NO: 1054428 - DNA, 33 bp, Homo sapien
ttggtcctaagttagatgcaggggcaaaattta

SEQ ID NO: 1054429 - DNA, 33 bp, Homo sapien
ggttatttcattccaacttcacaaaagaaaaag

SEQ ID NO: 1054430 - DNA, 33 bp, Homo sapien
ggttatttcattccaatttcacaaaagaaaaag

SEQ ID NO: 1054431 - DNA, 33 bp, Homo sapien
tcaattgcctgatccacgattgcaaagattact

SEQ ID NO: 1054432 - DNA, 33 bp, Homo sapien
tcaattgcctgatccatgattgcaaagattact

SEQ ID NO: 1054433 - DNA, 33 bp, Homo sapien
atatctactgagcttacggttatctttatcaag

SEQ ID NO: 1054434 - DNA, 33 bp, Homo sapien
atatctactgagcttatggttatctttatcaag

SEQ ID NO: 1054435 - DNA, 33 bp, Homo sapien
ttcaaaggaaaattcaaatggttgttatgttgt

SEQ ID NO: 1054436 - DNA, 33 bp, Homo sapien
ttcaaaggaaaattcagatggttgttatgttgt

SEQ ID NO: 1054437 - DNA, 33 bp, Homo sapien
aacactataacaaaaggcactggtaagagagtg

SEQ ID NO: 1054438 - DNA, 33 bp, Homo sapien
aacactataacaaaagtcactggtaagagagtg

SEQ ID NO: 1054439 - DNA, 33 bp, Homo sapien
attatcctccctgcaaccctctctatcttcttt

SEQ ID NO: 1054440 - DNA, 33 bp, Homo sapien
attatcctccctgcaatcctctctatcttcttt

SEQ ID NO: 1054441 - DNA, 33 bp, Homo sapien
gtgaatacctggggtacgtgagcgacagaaaga

SEQ ID NO: 1054442 - DNA, 33 bp, Homo sapien
gtgaatacctggggtatgtgagcgacagaaaga

SEQ ID NO: 1054443 - DNA, 33 bp, Homo sapien
gaatcttgagaagagaatattaccctggattat

SEQ ID NO: 1054444 - DNA, 33 bp, Homo sapien
gaatcttgagaagagattattaccctggattat

SEQ ID NO: 1054445 - DNA, 33 bp, Homo sapien
aatgttagggaaaccaacatgacaagcaaaatg

SEQ ID NO: 1054446 - DNA, 33 bp, Homo sapien
aatgttagggaaaccagcatgacaagcaaaatg

SEQ ID NO: 1054447 - DNA, 33 bp, Homo sapien
tttttaatgaatgaaaatacactctgaaagcta

SEQ ID NO: 1054448 - DNA, 33 bp, Homo sapien
tttttaatgaatgaaagtacactctgaaagcta

SEQ ID NO: 1054449 - DNA, 33 bp, Homo sapien
acatttcagatgaaccagaggaagactttaatg

SEQ ID NO: 1054450 - DNA, 33 bp, Homo sapien
acatttcagatgaaccggaggaagactttaatg

SEQ ID NO: 1054451 - DNA, 33 bp, Homo sapien
gcagatgtttacaacaatgtagtttttattcca

SEQ ID NO: 1054452 - DNA, 33 bp, Homo sapien
gcagatgtttacaacagtgtagtttttattcca

SEQ ID NO: 1054453 - DNA, 33 bp, Homo sapien
aagatacaggacaaaacaatcatcatagatatc

SEQ ID NO: 1054454 - DNA, 33 bp, Homo sapien
aagatacaggacaaaataatcatcatagatatc

SEQ ID NO: 1054455 - DNA, 33 bp, Homo sapien
gcaccagggctatttcccaggtaataacagtta

SEQ ID NO: 1054456 - DNA, 33 bp, Homo sapien
gcaccagggctatttctcaggtaataacagtta

SEQ ID NO: 1054457 - DNA, 33 bp, Homo sapien
ctatggaaaattgagaagaaagcatccagtaag

SEQ ID NO: 1054458 - DNA, 33 bp, Homo sapien
ctatggaaaattgagatgaaagcatccagtaag

SEQ ID NO: 1054459 - DNA, 33 bp, Homo sapien
aaatgcactgatgaagaaacatgacaggggatt

SEQ ID NO: 1054460 - DNA, 33 bp, Homo sapien
aaatgcactgatgaaggaacatgacaggggatt

SEQ ID NO: 1054461 - DNA, 33 bp, Homo sapien
tgcacatacagtagaacatatgccactttttaa

SEQ ID NO: 1054462 - DNA, 33 bp, Homo sapien
tgcacatacagtagaatatatgccactttttaa

SEQ ID NO: 1054463 - DNA, 33 bp, Homo sapien
gtatggataagcttggaatatttagcaactggt

SEQ ID NO: 1054464 - DNA, 33 bp, Homo sapien
gtatggataagcttggcatatttagcaactggt

SEQ ID NO: 1054465 - DNA, 33 bp, Homo sapien
aggctagaagatgtagacaagacatttggtata

SEQ ID NO: 1054466 - DNA, 33 bp, Homo sapien
aggctagaagatgtagccaagacatttggtata

SEQ ID NO: 1054467 - DNA, 33 bp, Homo sapien
ctggcccggagagacaagtgtacttttctgcca

SEQ ID NO: 1054468 - DNA, 33 bp, Homo sapien
ctggcccggagagacaggtgtacttttctgcca

SEQ ID NO: 1054469 - DNA, 33 bp, Homo sapien
ggggtagtctttagtacctctgtgttatagaag

SEQ ID NO: 1054470 - DNA, 33 bp, Homo sapien
ggggtagtctttagtatctctgtgttatagaag

SEQ ID NO: 1054471 - DNA, 33 bp, Homo sapien
acccatttccagtctcgccattatccactccaa

SEQ ID NO: 1054472 - DNA, 33 bp, Homo sapien
acccatttccagtctctccattatccactccaa

SEQ ID NO: 1054473 - DNA, 33 bp, Homo sapien
tcaggaatcagcaagcactaagatattcttagc

SEQ ID NO: 1054474 - DNA, 33 bp, Homo sapien
tcaggaatcagcaagcgctaagatattcttagc

SEQ ID NO: 1054475 - DNA, 33 bp, Homo sapien
ggagacacgaggaagaagagacaataaaagtaa

SEQ ID NO: 1054476 - DNA, 33 bp, Homo sapien
ggagacacgaggaagaggagacaataaaagtaa

SEQ ID NO: 1054477 - DNA, 33 bp, Homo sapien
gaaatagtaagagctagatttggcatgaaggag

SEQ ID NO: 1054478 - DNA, 33 bp, Homo sapien
gaaatagtaagagctatatttggcatgaaggag

SEQ ID NO: 1054479 - DNA, 33 bp, Homo sapien
attgttcatagtattaagttgatgcgaatgtgg

SEQ ID NO: 1054480 - DNA, 33 bp, Homo sapien
attgttcatagtattaggttgatgcgaatgtgg

SEQ ID NO: 1054481 - DNA, 33 bp, Homo sapien
aattatgaaaggacacagcaggataataaagtg

SEQ ID NO: 1054482 - DNA, 33 bp, Homo sapien
aattatgaaaggacacggcaggataataaagtg

SEQ ID NO: 1054483 - DNA, 33 bp, Homo sapien
tacctataagataccacgaaagaaagatgtttg

SEQ ID NO: 1054484 - DNA, 33 bp, Homo sapien
tacctataagataccatgaaagaaagatgtttg

SEQ ID NO: 1054485 - DNA, 33 bp, Homo sapien
catctcaaacctgaacacatctctatttaattc

SEQ ID NO: 1054486 - DNA, 33 bp, Homo sapien
catctcaaacctgaacgcatctctatttaattc

SEQ ID NO: 1054487 - DNA, 33 bp, Homo sapien
gtggctttacagatgaacagtcaagaacagccc

SEQ ID NO: 1054488 - DNA, 33 bp, Homo sapien
gtggctttacagatgagcagtcaagaacagccc

SEQ ID NO: 1054489 - DNA, 33 bp, Homo sapien
catgagatatagggtgcacttgtcagaaggatg

SEQ ID NO: 1054490 - DNA, 33 bp, Homo sapien
catgagatatagggtggacttgtcagaaggatg

SEQ ID NO: 1054491 - DNA, 33 bp, Homo sapien
caggacataaaaatccagcaaagttagcagctt

SEQ ID NO: 1054492 - DNA, 33 bp, Homo sapien
caggacataaaaatccggcaaagttagcagctt

SEQ ID NO: 1054493 - DNA, 33 bp, Homo sapien
tttaagaggaaattaaagtcagaacacaaaaaa

SEQ ID NO: 1054494 - DNA, 33 bp, Homo sapien
tttaagaggaaattaacgtcagaacacaaaaaa

SEQ ID NO: 1054495 - DNA, 33 bp, Homo sapien
gccactttcatacgaaccctcatcttcgagtct

SEQ ID NO: 1054496 - DNA, 33 bp, Homo sapien
gccactttcatacgaatcctcatcttcgagtct

SEQ ID NO: 1054497 - DNA, 33 bp, Homo sapien
ttcagtaatcgttggccagagaacctcttgatt

SEQ ID NO: 1054498 - DNA, 33 bp, Homo sapien
ttcagtaatcgttggctagagaacctcttgatt

SEQ ID NO: 1054499 - DNA, 33 bp, Homo sapien
atataattttaatccaatcacataaggtaaata

SEQ ID NO: 1054500 - DNA, 33 bp, Homo sapien
atataattttaatccagtcacataaggtaaata

SEQ ID NO: 1054501 - DNA, 33 bp, Homo sapien
tatagtttatttcaaaaagtgactggcatcttc

SEQ ID NO: 1054502 - DNA, 33 bp, Homo sapien
tatagtttatttcaaagagtgactggcatcttc

SEQ ID NO: 1054503 - DNA, 33 bp, Homo sapien
tccatagggcagcctaaacaaaaaacacaatgg

SEQ ID NO: 1054504 - DNA, 33 bp, Homo sapien
tccatagggcagcctagacaaaaaacacaatgg

SEQ ID NO: 1054505 - DNA, 33 bp, Homo sapien
ctgggaaataaatgaaaaggttaagcagataag

SEQ ID NO: 1054506 - DNA, 33 bp, Homo sapien
ctgggaaataaatgaagaggttaagcagataag

SEQ ID NO: 1054507 - DNA, 33 bp, Homo sapien
ttttccttaacacttacgacccatttccagatg

SEQ ID NO: 1054508 - DNA, 33 bp, Homo sapien
ttttccttaacacttatgacccatttccagatg

SEQ ID NO: 1054509 - DNA, 33 bp, Homo sapien
ccctgaattatactcacctcagtaagaaacatc

SEQ ID NO: 1054510 - DNA, 33 bp, Homo sapien
ccctgaattatactcatctcagtaagaaacatc

SEQ ID NO: 1054511 - DNA, 33 bp, Homo sapien
agtttctcaatgtggaagtttatgttaccgatt

SEQ ID NO: 1054512 - DNA, 33 bp, Homo sapien
agtttctcaatgtggacgtttatgttaccgatt

SEQ ID NO: 1054513 - DNA, 33 bp, Homo sapien
cacattcatcatcttccatagtcacttttttag

SEQ ID NO: 1054514 - DNA, 33 bp, Homo sapien
cacattcatcatcttctatagtcacttttttag

SEQ ID NO: 1054515 - DNA, 33 bp, Homo sapien
tgctgtcaggaaaggaacttaagagtcccaaaa

SEQ ID NO: 1054516 - DNA, 33 bp, Homo sapien
tgctgtcaggaaaggatcttaagagtcccaaaa

SEQ ID NO: 1054517 - DNA, 33 bp, Homo sapien; identical to SEQ ID NO: 1054515

SEQ ID NO: 1054518 - DNA, 33 bp, Homo sapien; identical to SEQ ID NO: 1054516

SEQ ID NO: 1054519 - DNA, 33 bp, Homo sapien
atttcaaatccgttcagctctataaaatttcct

SEQ ID NO: 1054520 - DNA, 33 bp, Homo sapien
atttcaaatccgttcatctctataaaatttcct

SEQ ID NO: 1054521 - DNA, 33 bp, Homo sapien
atgaaagtcaggaaaaattgcctgtttgcttga

SEQ ID NO: 1054522 - DNA, 33 bp, Homo sapien
atgaaagtcaggaaaagttgcctgtttgcttga

SEQ ID NO: 1054523 - DNA, 33 bp, Homo sapien
ttctgaataaatcatcagaactatgggatgttt

SEQ ID NO: 1054524 - DNA, 33 bp, Homo sapien
ttctgaataaatcatcggaactatgggatgttt

SEQ ID NO: 1054525 - DNA, 33 bp, Homo sapien
agcactgaaggaaacaagccctagtgctagaga

SEQ ID NO: 1054526 - DNA, 33 bp, Homo sapien
agcactgaaggaaacaggccctagtgctagaga

SEQ ID NO: 1054527 - DNA, 33 bp, Homo sapien
tgaaaattggaatgcaatagggaaagaactgtc

SEQ ID NO: 1054528 - DNA, 33 bp, Homo sapien
tgaaaattggaatgcagtagggaaagaactgtc

SEQ ID NO: 1054529 - DNA, 33 bp, Homo sapien
acacatattgtatcagaatagaatcacaaggat

SEQ ID NO: 1054530 - DNA, 33 bp, Homo sapien
acacatattgtatcaggatagaatcacaaggat

SEQ ID NO: 1054531 - DNA, 33 bp, Homo sapien
atatctgcctttgtaacgggctcttgcatttga

SEQ ID NO: 1054532 - DNA, 33 bp, Homo sapien
atatctgcctttgtaatgggctcttgcatttga

SEQ ID NO: 1054533 - DNA, 33 bp, Homo sapien
atcaagtgaactctggaaaacatccttcaaaca

SEQ ID NO: 1054534 - DNA, 33 bp, Homo sapien
atcaagtgaactctgggaaacatccttcaaaca

SEQ ID NO: 1054535 - DNA, 33 bp, Homo sapien
gaaatgtgaaaggacgcagaattgtaatagttg

SEQ ID NO: 1054536 - DNA, 33 bp, Homo sapien
gaaatgtgaaaggacgtagaattgtaatagttg

SEQ ID NO: 1054537 - DNA, 33 bp, Homo sapien
tacttagtttattcaacaatgtaggagaaatta

SEQ ID NO: 1054538 - DNA, 33 bp, Homo sapien
tacttagtttattcaagaatgtaggagaaatta

SEQ ID NO: 1054539 - DNA, 33 bp, Homo sapien
tcagacttccaactaccagaactatgagtaata

SEQ ID NO: 1054540 - DNA, 33 bp, Homo sapien
tcagacttccaactacgagaactatgagtaata

SEQ ID NO: 1054541 - DNA, 33 bp, Homo sapien
ttaagattatgtcacaatgaaggacttgcagtt

SEQ ID NO: 1054542 - DNA, 33 bp, Homo sapien
ttaagattatgtcacattgaaggacttgcagtt

SEQ ID NO: 1054543 - DNA, 33 bp, Homo sapien
actatgtaactgtttacggaaagtttgcaagtg

SEQ ID NO: 1054544 - DNA, 33 bp, Homo sapien
actatgtaactgtttatggaaagtttgcaagtg

SEQ ID NO: 1054545 - DNA, 33 bp, Homo sapien
agccaactttatcaacactgtggatcagatatt

SEQ ID NO: 1054546 - DNA, 33 bp, Homo sapien
agccaactttatcaacgctgtggatcagatatt

SEQ ID NO: 1054547 - DNA, 33 bp, Homo sapien
gaccattagaagatcaaagttgaaatgtatggg

SEQ ID NO: 1054548 - DNA, 33 bp, Homo sapien
gaccattagaagatcagagttgaaatgtatggg

SEQ ID NO: 1054549 - DNA, 33 bp, Homo sapien
ttttgataatgccataactttgataagaagtta

SEQ ID NO: 1054550 - DNA, 33 bp, Homo sapien
ttttgataatgccatatctttgataagaagtta

SEQ ID NO: 1054551 - DNA, 33 bp, Homo sapien
attggttcagttgaaaaatcattacgttaagag

SEQ ID NO: 1054552 - DNA, 33 bp, Homo sapien
attggttcagttgaaacatcattacgttaagag

SEQ ID NO: 1054553 - DNA, 33 bp, Homo sapien
caatctttgacacattaaatgtaactagattat

SEQ ID NO: 1054554 - DNA, 33 bp, Homo sapien
caatctttgacacattcaatgtaactagattat

SEQ ID NO: 1054555 - DNA, 33 bp, Homo sapien
aaactatgctacaccaacttcacatactggctg

SEQ ID NO: 1054556 - DNA, 33 bp, Homo sapien
aaactatgctacaccagcttcacatactggctg

SEQ ID NO: 1054557 - DNA, 33 bp, Homo sapien
tactgttagttcaactcactacttttcatgata

SEQ ID NO: 1054558 - DNA, 33 bp, Homo sapien
tactgttagttcaacttactacttttcatgata

SEQ ID NO: 1054559 - DNA, 33 bp, Homo sapien
gtattagcaagcttatcaaaataaaccatagat

SEQ ID NO: 1054560 - DNA, 33 bp, Homo sapien
gtattagcaagcttatgaaaataaaccatagat

SEQ ID NO: 1054561 - DNA, 33 bp, Homo sapien
tgtggtatggaacctacagccttatcagcaacc

SEQ ID NO: 1054562 - DNA, 33 bp, Homo sapien
tgtggtatggaacctagagccttatcagcaacc

SEQ ID NO: 1054563 - DNA, 33 bp, Homo sapien
acagcgcccggcgagaacactttctaattcact

SEQ ID NO: 1054564 - DNA, 33 bp, Homo sapien
acagcgcccggcgagagcactttctaattcact

SEQ ID NO: 1054565 - DNA, 33 bp, Homo sapien
aaacttatgatgaaaaacgtaaaatgtccattt

SEQ ID NO: 1054566 - DNA, 33 bp, Homo sapien
aaacttatgatgaaaaccgtaaaatgtccattt

SEQ ID NO: 1054567 - DNA, 33 bp, Homo sapien
tgctgtggaaaagagaacactttcagtcacagt

SEQ ID NO: 1054568 - DNA, 33 bp, Homo sapien
tgctgtggaaaagagagcactttcagtcacagt

SEQ ID NO: 1054569 - DNA, 33 bp, Homo sapien
taagttcccctgctaacagtcagcaccaaattg

SEQ ID NO: 1054570 - DNA, 33 bp, Homo sapien
taagttcccctgctaatagtcagcaccaaattg

SEQ ID NO: 1054571 - DNA, 33 bp, Homo sapien
actttaaactatgaaactgtgaaagaaaacatt

SEQ ID NO: 1054572 - DNA, 33 bp, Homo sapien
actttaaactatgaaagtgtgaaagaaaacatt

SEQ ID NO: 1054573 - DNA, 33 bp, Homo sapien
tttttggatcccacaactatactgaatttgagg

SEQ ID NO: 1054574 - DNA, 33 bp, Homo sapien
tttttggatcccacaattatactgaatttgagg

SEQ ID NO: 1054575 - DNA, 33 bp, Homo sapien
gtctattctcatattaacctctgatttatatcc

SEQ ID NO: 1054576 - DNA, 33 bp, Homo sapien
gtctattctcatattaccctctgatttatatcc

SEQ ID NO: 1054577 - DNA, 33 bp, Homo sapien
aattcacctcaaatgcaactgaatatttttcat

SEQ ID NO: 1054578 - DNA, 33 bp, Homo sapien
aattcacctcaaatgcgactgaatatttttcat

SEQ ID NO: 1054579 - DNA, 33 bp, Homo sapien
ctacttacagctaaaaatcgtgaacattatata

SEQ ID NO: 1054580 - DNA, 33 bp, Homo sapien
ctacttacagctaaaattcgtgaacattatata

SEQ ID NO: 1054581 - DNA, 33 bp, Homo sapien
gttgccaaagattaggacaattgattcagtcag

SEQ ID NO: 1054582 - DNA, 33 bp, Homo sapien
gttgccaaagattaggtcaattgattcagtcag

SEQ ID NO: 1054583 - DNA, 33 bp, Homo sapien
caataggaggagtacacagaaagtctgatggca

SEQ ID NO: 1054584 - DNA, 33 bp, Homo sapien
caataggaggagtacagagaaagtctgatggca

SEQ ID NO: 1054585 - DNA, 33 bp, Homo sapien
gcaacttgacatatcaaaaagagctgtgttaaa

SEQ ID NO: 1054586 - DNA, 33 bp, Homo sapien
gcaacttgacatatcagaaagagctgtgttaaa

SEQ ID NO: 1054587 - DNA, 33 bp, Homo sapien
acactgcaaagggatacattgtttgtatgcgtg

SEQ ID NO: 1054588 - DNA, 33 bp, Homo sapien
acactgcaaagggatatattgtttgtatgcgtg

SEQ ID NO: 1054589 - DNA, 33 bp, Homo sapien
tggataccttttacaaaatttttggcaagagta

SEQ ID NO: 1054590 - DNA, 33 bp, Homo sapien
tggataccttttacaatatttttggcaagagta

SEQ ID NO: 1054591 - DNA, 33 bp, Homo sapien
tagccttgcagattacaaaattccttggggtag

SEQ ID NO: 1054592 - DNA, 33 bp, Homo sapien
tagccttgcagattacgaaattccttggggtag

SEQ ID NO: 1054593 - DNA, 33 bp, Homo sapien
tatgcctcttcctttaagttatcaccagtatta

SEQ ID NO: 1054594 - DNA, 33 bp, Homo sapien
tatgcctcttcctttaggttatcaccagtatta

SEQ ID NO: 1054595 - DNA, 33 bp, Homo sapien
ctggtgaccatgaagcagcaaatatgaggccta

SEQ ID NO: 1054596 - DNA, 33 bp, Homo sapien
ctggtgaccatgaagcggcaaatatgaggccta

SEQ ID NO: 1054597 - DNA, 33 bp, Homo sapien
aactgcatgataaaaaaatgaaaaattaattgc

SEQ ID NO: 1054598 - DNA, 33 bp, Homo sapien
aactgcatgataaaaacatgaaaaattaattgc

SEQ ID NO: 1054599 - DNA, 33 bp, Homo sapien
tctttttaacaaaacaatgagagataaaagcca

SEQ ID NO: 1054600 - DNA, 33 bp, Homo sapien
tctttttaacaaaacattgagagataaaagcca

SEQ ID NO: 1054601 - DNA, 33 bp, Homo sapien
taattttagagttagacaattgtactgaggtga

SEQ ID NO: 1054602 - DNA, 33 bp, Homo sapien
taattttagagttagataattgtactgaggtga

SEQ ID NO: 1054603 - DNA, 33 bp, Homo sapien
ctagtaggtgtagagcaatctcattttcttttg

SEQ ID NO: 1054604 - DNA, 33 bp, Homo sapien
ctagtaggtgtagagcgatctcattttcttttg

SEQ ID NO: 1054605 - DNA, 33 bp, Homo sapien
cattattccataatacaatccagttcttgtgtt

SEQ ID NO: 1054606 - DNA, 33 bp, Homo sapien
cattattccataataccatccagttcttgtgtt

SEQ ID NO: 1054607 - DNA, 33 bp, Homo sapien
attgcttatcaacctgaacttcgtatttagcat

SEQ ID NO: 1054608 - DNA, 33 bp, Homo sapien
attgcttatcaacctggacttcgtatttagcat

SEQ ID NO: 1054609 - DNA, 33 bp, Homo sapien
ctacagaccagaccaagatctttgctgtgcaag

SEQ ID NO: 1054610 - DNA, 33 bp, Homo sapien
ctacagaccagaccaatatctttgctgtgcaag

SEQ ID NO: 1054611 - DNA, 33 bp, Homo sapien
accttgagactagcgccgccaagtattgggagt

SEQ ID NO: 1054612 - DNA, 33 bp, Homo sapien
accttgagactagcgctgccaagtattgggagt

SEQ ID NO: 1054613 - DNA, 33 bp, Homo sapien
ccatcatcaattcccacccagattattgtccat

SEQ ID NO: 1054614 - DNA, 33 bp, Homo sapien
ccatcatcaattcccatccagattattgtccat

SEQ ID NO: 1054615 - DNA, 33 bp, Homo sapien
tacgtctgctttaataactctgtgatgatttgt

SEQ ID NO: 1054616 - DNA, 33 bp, Homo sapien
tacgtctgctttaatagctctgtgatgatttgt

SEQ ID NO: 1054617 - DNA, 33 bp, Homo sapien
aaagtgaattatgaccaagaagtttgctgggag

SEQ ID NO: 1054618 - DNA, 33 bp, Homo sapien
aaagtgaattatgaccgagaagtttgctgggag

SEQ ID NO: 1054619 - DNA, 33 bp, Homo sapien
aatgtataggaaaaagaatgtacctgttgaaat

SEQ ID NO: 1054620 - DNA, 33 bp, Homo sapien
aatgtataggaaaaaggatgtacctgttgaaat

SEQ ID NO: 1054621 - DNA, 33 bp, Homo sapien
cctttgtgaggttataccctaatacttccttaa

SEQ ID NO: 1054622 - DNA, 33 bp, Homo sapien
cctttgtgaggttatatcctaatacttccttaa

SEQ ID NO: 1054623 - DNA, 33 bp, Homo sapien
ccaggaggcagagctaaaccagggacatcaggg

SEQ ID NO: 1054624 - DNA, 33 bp, Homo sapien
ccaggaggcagagctagaccagggacatcaggg

SEQ ID NO: 1054625 - DNA, 33 bp, Homo sapien
tttattagcaaatatcacaaataagggtactta

SEQ ID NO: 1054626 - DNA, 33 bp, Homo sapien
tttattagcaaatatctcaaataagggtactta

SEQ ID NO: 1054627 - DNA, 33 bp, Homo sapien
tctcagttgttgactacgcaaggaaactcttat

SEQ ID NO: 1054628 - DNA, 33 bp, Homo sapien
tctcagttgttgactatgcaaggaaactcttat

SEQ ID NO: 1054629 - DNA, 33 bp, Homo sapien
ggatgtgataaagttaaatgaaattttgtgtaa

SEQ ID NO: 1054630 - DNA, 33 bp, Homo sapien
ggatgtgataaagttatatgaaattttgtgtaa

SEQ ID NO: 1054631 - DNA, 33 bp, Homo sapien
cagatctcattgaattcaatacttccctatgga

SEQ ID NO: 1054632 - DNA, 33 bp, Homo sapien
cagatctcattgaatttaatacttccctatgga

SEQ ID NO: 1054633 - DNA, 33 bp, Homo sapien
cttttccatgaggacactagcaatcccttcttc

SEQ ID NO: 1054634 - DNA, 33 bp, Homo sapien
cttttccatgaggacagtagcaatcccttcttc

SEQ ID NO: 1054635 - DNA, 33 bp, Homo sapien
tcggcaatgataaaaccgcatgatttgattcat

SEQ ID NO: 1054636 - DNA, 33 bp, Homo sapien
tcggcaatgataaaactgcatgatttgattcat

SEQ ID NO: 1054637 - DNA, 33 bp, Homo sapien
aaaatgaaggaatataagctggatgaaaataca

SEQ ID NO: 1054638 - DNA, 33 bp, Homo sapien
aaaatgaaggaatataggctggatgaaaataca

SEQ ID NO: 1054639 - DNA, 33 bp, Homo sapien
tgtttcctggagtatcactgactaaaaatatca

SEQ ID NO: 1054640 - DNA, 33 bp, Homo sapien
tgtttcctggagtatcgctgactaaaaatatca

SEQ ID NO: 1054641 - DNA, 33 bp, Homo sapien
aaaggtttagaagcaacgtcatattctaagaat

SEQ ID NO: 1054642 - DNA, 33 bp, Homo sapien
aaaggtttagaagcaatgtcatattctaagaat

SEQ ID NO: 1054643 - DNA, 33 bp, Homo sapien
agtcatagttcagaaaagctgtcatggcaaaca

SEQ ID NO: 1054644 - DNA, 33 bp, Homo sapien
agtcatagttcagaaaggctgtcatggcaaaca

SEQ ID NO: 1054645 - DNA, 33 bp, Homo sapien
ggcaaggaagatcataagtgtggaacagcagat

SEQ ID NO: 1054646 - DNA, 33 bp, Homo sapien
ggcaaggaagatcataggtgtggaacagcagat

SEQ ID NO: 1054647 - DNA, 33 bp, Homo sapien
ctggtgcaattcctaaacgatgcagcccatctg

SEQ ID NO: 1054648 - DNA, 33 bp, Homo sapien
ctggtgcaattcctaagcgatgcagcccatctg

SEQ ID NO: 1054649 - DNA, 33 bp, Homo sapien
cagcagacaaagtactgacagagcagagatttt

SEQ ID NO: 1054650 - DNA, 33 bp, Homo sapien
cagcagacaaagtacttacagagcagagatttt

SEQ ID NO: 1054651 - DNA, 33 bp, Homo sapien
ttaaagtgatctaactgagaatgttgcttaaat

SEQ ID NO: 1054652 - DNA, 33 bp, Homo sapien
ttaaagtgatctaacttagaatgttgcttaaat

SEQ ID NO: 1054653 - DNA, 33 bp, Homo sapien
gagttacagtactacaatattttccttaaccct

SEQ ID NO: 1054654 - DNA, 33 bp, Homo sapien
gagttacagtactacagtattttccttaaccct

SEQ ID NO: 1054655 - DNA, 33 bp, Homo sapien
agaagcaatgccaggaaagaataaacttaatgg

SEQ ID NO: 1054656 - DNA, 33 bp, Homo sapien
agaagcaatgccaggacagaataaacttaatgg

SEQ ID NO: 1054657 - DNA, 33 bp, Homo sapien
catgcccaggcttatcaacaataccctgctcac

SEQ ID NO: 1054658 - DNA, 33 bp, Homo sapien
catgcccaggcttatcgacaataccctgctcac

SEQ ID NO: 1054659 - DNA, 33 bp, Homo sapien
caccaccatcagtggaactttgttactatttag

SEQ ID NO: 1054660 - DNA, 33 bp, Homo sapien
caccaccatcagtggatctttgttactatttag

SEQ ID NO: 1054661 - DNA, 33 bp, Homo sapien
ctgcacatcatatccccctcccactttggaaat

SEQ ID NO: 1054662 - DNA, 33 bp, Homo sapien
ctgcacatcatatccctctcccactttggaaat

SEQ ID NO: 1054663 - DNA, 33 bp, Homo sapien
agaagtccttgcaccaaaagtagtatctagaac

SEQ ID NO: 1054664 - DNA, 33 bp, Homo sapien
agaagtccttgcaccacaagtagtatctagaac

SEQ ID NO: 1054665 - DNA, 33 bp, Homo sapien
tctaagaaacagaggtcaagggcctatctcagg

SEQ ID NO: 1054666 - DNA, 33 bp, Homo sapien
tctaagaaacagaggtgaagggcctatctcagg

SEQ ID NO: 1054667 - DNA, 33 bp, Homo sapien
ttctttgacacctgtagcttaatcctgtcactc

SEQ ID NO: 1054668 - DNA, 33 bp, Homo sapien
ttctttgacacctgtatcttaatcctgtcactc

SEQ ID NO: 1054669 - DNA, 33 bp, Homo sapien
gacttagtagaatttgaacagatattaataaag

SEQ ID NO: 1054670 - DNA, 33 bp, Homo sapien
gacttagtagaatttggacagatattaataaag

SEQ ID NO: 1054671 - DNA, 33 bp, Homo sapien
ggtagtgtttctgtaacgggccaggaatggaat

SEQ ID NO: 1054672 - DNA, 33 bp, Homo sapien
ggtagtgtttctgtaatgggccaggaatggaat

SEQ ID NO: 1054673 - DNA, 33 bp, Homo sapien
tcaacaaattgcggcacaacttacaattttgag

SEQ ID NO: 1054674 - DNA, 33 bp, Homo sapien
tcaacaaattgcggcataacttacaattttgag

SEQ ID NO: 1054675 - DNA, 33 bp, Homo sapien
attattttaaagttgaaccgctgaaacttgttc

SEQ ID NO: 1054676 - DNA, 33 bp, Homo sapien
attattttaaagttgagccgctgaaacttgttc

SEQ ID NO: 1054677 - DNA, 33 bp, Homo sapien
tttgtccaatcattcccgaggcttaatctttta

SEQ ID NO: 1054678 - DNA, 33 bp, Homo sapien
tttgtccaatcattcctgaggcttaatctttta

SEQ ID NO: 1054679 - DNA, 33 bp, Homo sapien
agtgattcgattgacaataagttttgttttact

SEQ ID NO: 1054680 - DNA, 33 bp, Homo sapien
agtgattcgattgacagtaagttttgttttact

SEQ ID NO: 1054681 - DNA, 33 bp, Homo sapien
aatggagaaataataacaattcgagttaatttc

SEQ ID NO: 1054682 - DNA, 33 bp, Homo sapien
aatggagaaataataataattcgagttaatttc

SEQ ID NO: 1054683 - DNA, 33 bp, Homo sapien
ccccatatttctccacagtagttagcaaaagct

SEQ ID NO: 1054684 - DNA, 33 bp, Homo sapien
ccccatatttctccactgtagttagcaaaagct

SEQ ID NO: 1054685 - DNA, 33 bp, Homo sapien
cccataagttgtttctcactcttcatggctggg

SEQ ID NO: 1054686 - DNA, 33 bp, Homo sapien
cccataagttgtttcttactcttcatggctggg

SEQ ID NO: 1054687 - DNA, 33 bp, Homo sapien
tttcactgtcagatacaagagcctggtaaaact

SEQ ID NO: 1054688 - DNA, 33 bp, Homo sapien
tttcactgtcagatacgagagcctggtaaaact

SEQ ID NO: 1054689 - DNA, 33 bp, Homo sapien
tgaatggtgtgtctacaatcatcttattttcat

SEQ ID NO: 1054690 - DNA, 33 bp, Homo sapien
tgaatggtgtgtctacgatcatcttattttcat

SEQ ID NO: 1054691 - DNA, 33 bp, Homo sapien
tttgtacaaggcactacgttagcctcaatgtat

SEQ ID NO: 1054692 - DNA, 33 bp, Homo sapien
tttgtacaaggcactatgttagcctcaatgtat

SEQ ID NO: 1054693 - DNA, 33 bp, Homo sapien
tatacaaagccttctaacatatctttctgactt

SEQ ID NO: 1054694 - DNA, 33 bp, Homo sapien
tatacaaagccttctagcatatctttctgactt

SEQ ID NO: 1054695 - DNA, 33 bp, Homo sapien
ccttagtcatttcacccagtactgtggttttaa

SEQ ID NO: 1054696 - DNA, 33 bp, Homo sapien
ccttagtcatttcacctagtactgtggttttaa

SEQ ID NO: 1054697 - DNA, 33 bp, Homo sapien
tgttgtattagcaaacaaaagtagcagatgatg

SEQ ID NO: 1054698 - DNA, 33 bp, Homo sapien
tgttgtattagcaaacgaaagtagcagatgatg

SEQ ID NO: 1054699 - DNA, 33 bp, Homo sapien
attgtaaatggtattgaagttaacatatgagtg

SEQ ID NO: 1054700 - DNA, 33 bp, Homo sapien
attgtaaatggtattgcagttaacatatgagtg

SEQ ID NO: 1054701 - DNA, 33 bp, Homo sapien
tggttgggtatatttacgaaaggtgtgtggctc

SEQ ID NO: 1054702 - DNA, 33 bp, Homo sapien
tggttgggtatatttatgaaaggtgtgtggctc

SEQ ID NO: 1054703 - DNA, 33 bp, Homo sapien
tttaatatgtagatgtcaaataggtagatggct

SEQ ID NO: 1054704 - DNA, 33 bp, Homo sapien
tttaatatgtagatgttaaataggtagatggct

SEQ ID NO: 1054705 - DNA, 33 bp, Homo sapien
aagtcatccccatgagaatacaaatatagcttt

SEQ ID NO: 1054706 - DNA, 33 bp, Homo sapien
aagtcatccccatgagtatacaaatatagcttt

SEQ ID NO: 1054707 - DNA, 33 bp, Homo sapien
tttgagaatctgaaacaagcaagagagattatt

SEQ ID NO: 1054708 - DNA, 33 bp, Homo sapien
tttgagaatctgaaacgagcaagagagattatt

SEQ ID NO: 1054709 - DNA, 33 bp, Homo sapien
aattcatagtaatcgacaaaataagccacattc

SEQ ID NO: 1054710 - DNA, 33 bp, Homo sapien
aattcatagtaatcgataaaataagccacattc

SEQ ID NO: 1054711 - DNA, 33 bp, Homo sapien
gatttaagaacactgaaaaatctcatcacagca

SEQ ID NO: 1054712 - DNA, 33 bp, Homo sapien
gatttaagaacactgacaaatctcatcacagca

SEQ ID NO: 1054713 - DNA, 33 bp, Homo sapien
aaccagagattttccacgctcttaattgggata

SEQ ID NO: 1054714 - DNA, 33 bp, Homo sapien
aaccagagattttccatgctcttaattgggata

SEQ ID NO: 1054715 - DNA, 33 bp, Homo sapien
ctgtaatttctcaagagagtactagagaaacta

SEQ ID NO: 1054716 - DNA, 33 bp, Homo sapien
ctgtaatttctcaagatagtactagagaaacta

SEQ ID NO: 1054717 - DNA, 33 bp, Homo sapien
tgctttaccatacatacctgcatttctgtgtac

SEQ ID NO: 1054718 - DNA, 33 bp, Homo sapien
tgctttaccatacatatctgcatttctgtgtac

SEQ ID NO: 1054719 - DNA, 33 bp, Homo sapien
ctttgtaggtcaaacactatacctcttctgact

SEQ ID NO: 1054720 - DNA, 33 bp, Homo sapien
ctttgtaggtcaaacattatacctcttctgact

SEQ ID NO: 1054721 - DNA, 33 bp, Homo sapien
ctgtcaaaatctggtacctcatttttgttcaag

SEQ ID NO: 1054722 - DNA, 33 bp, Homo sapien
ctgtcaaaatctggtatctcatttttgttcaag

SEQ ID NO: 1054723 - DNA, 33 bp, Homo sapien
cctgagtttcctttatcaagacaagttgttgaa

SEQ ID NO: 1054724 - DNA, 33 bp, Homo sapien
cctgagtttcctttatgaagacaagttgttgaa

SEQ ID NO: 1054725 - DNA, 33 bp, Homo sapien
attcagcctctacttacaatggtcttttatctc

SEQ ID NO: 1054726 - DNA, 33 bp, Homo sapien
attcagcctctacttataatggtcttttatctc

SEQ ID NO: 1054727 - DNA, 33 bp, Homo sapien
attatgcaattttgtaacagaggctcaggctgg

SEQ ID NO: 1054728 - DNA, 33 bp, Homo sapien
attatgcaattttgtagcagaggctcaggctgg

SEQ ID NO: 1054729 - DNA, 33 bp, Homo sapien
attattatgggcttctcaatatcctgatataga

SEQ ID NO: 1054730 - DNA, 33 bp, Homo sapien
attattatgggcttctgaatatcctgatataga

SEQ ID NO: 1054731 - DNA, 33 bp, Homo sapien
tataccttaccaaggaatactgattttctagat

SEQ ID NO: 1054732 - DNA, 33 bp, Homo sapien
tataccttaccaaggagtactgattttctagat

SEQ ID NO: 1054733 - DNA, 33 bp, Homo sapien
ccacaggttccttaaacacagcataatcaaacc

SEQ ID NO: 1054734 - DNA, 33 bp, Homo sapien
ccacaggttccttaaatacagcataatcaaacc

SEQ ID NO: 1054735 - DNA, 33 bp, Homo sapien
tgctagaaaaccagtgaatcattctttgaaggg

SEQ ID NO: 1054736 - DNA, 33 bp, Homo sapien
tgctagaaaaccagtggatcattctttgaaggg

SEQ ID NO: 1054737 - DNA, 33 bp, Homo sapien
aatgcatgctcttccactgaaacacatattttc

SEQ ID NO: 1054738 - DNA, 33 bp, Homo sapien
aatgcatgctcttccattgaaacacatattttc

SEQ ID NO: 1054739 - DNA, 33 bp, Homo sapien
ccaaatagggtgataacatgaagtgaaaagcaa

SEQ ID NO: 1054740 - DNA, 33 bp, Homo sapien
ccaaatagggtgataatatgaagtgaaaagcaa

SEQ ID NO: 1054741 - DNA, 33 bp, Homo sapien
ggaagtacttttttatcactcatggcttaactc

SEQ ID NO: 1054742 - DNA, 33 bp, Homo sapien
ggaagtacttttttattactcatggcttaactc

SEQ ID NO: 1054743 - DNA, 33 bp, Homo sapien
tggcctcccaaagtagcaggataagcttcagtc

SEQ ID NO: 1054744 - DNA, 33 bp, Homo sapien
tggcctcccaaagtagtaggataagcttcagtc

SEQ ID NO: 1054745 - DNA, 33 bp, Homo sapien
gtgtatggtaattctgaaacactagatgtctaa

SEQ ID NO: 1054746 - DNA, 33 bp, Homo sapien
gtgtatggtaattctggaacactagatgtctaa

SEQ ID NO: 1054747 - DNA, 33 bp, Homo sapien
aaaaagtcttagaatacgagagctggaaagtgt

SEQ ID NO: 1054748 - DNA, 33 bp, Homo sapien
aaaaagtcttagaatatgagagctggaaagtgt

SEQ ID NO: 1054749 - DNA, 33 bp, Homo sapien
gtcgtatcatctagcccgatttactagagttta

SEQ ID NO: 1054750 - DNA, 33 bp, Homo sapien
gtcgtatcatctagcctgatttactagagttta

SEQ ID NO: 1054751 - DNA, 33 bp, Homo sapien
tctttttaaaagaaccaataaaacgtgacacag

SEQ ID NO: 1054752 - DNA, 33 bp, Homo sapien
tctttttaaaagaaccgataaaacgtgacacag

SEQ ID NO: 1054753 - DNA, 33 bp, Homo sapien
ccaaaccatgcttctgcagtgggggccattggt

SEQ ID NO: 1054754 - DNA, 33 bp, Homo sapien
ccaaaccatgcttctggagtgggggccattggt

SEQ ID NO: 1054755 - DNA, 33 bp, Homo sapien
attagacagtgaaaaacgttaaaaagaactggt

SEQ ID NO: 1054756 - DNA, 33 bp, Homo sapien
attagacagtgaaaaatgttaaaaagaactggt

SEQ ID NO: 1054757 - DNA, 33 bp, Homo sapien
ttcaaatgattgcacaagtttcacaactgactc

SEQ ID NO: 1054758 - DNA, 33 bp, Homo sapien
ttcaaatgattgcacaggtttcacaactgactc

SEQ ID NO: 1054759 - DNA, 33 bp, Homo sapien
ttatacatttttaagacaagtcactatcaacta

SEQ ID NO: 1054760 - DNA, 33 bp, Homo sapien
ttatacatttttaagataagtcactatcaacta

SEQ ID NO: 1054761 - DNA, 33 bp, Homo sapien
tccttgatttatgacaaggttacatctgcaaaa

SEQ ID NO: 1054762 - DNA, 33 bp, Homo sapien
tccttgatttatgacagggttacatctgcaaaa

SEQ ID NO: 1054763 - DNA, 33 bp, Homo sapien
gaaagcattcataatacggattttttaggtcaa

SEQ ID NO: 1054764 - DNA, 33 bp, Homo sapien
gaaagcattcataatatggattttttaggtcaa

SEQ ID NO: 1054765 - DNA, 33 bp, Homo sapien
gatagtttcaagtttgcataatccaggtttagg

SEQ ID NO: 1054766 - DNA, 33 bp, Homo sapien
gatagtttcaagtttgtataatccaggtttagg

SEQ ID NO: 1054767 - DNA, 33 bp, Homo sapien
ccggtactgtcaccgactagatgtgacctatgg

SEQ ID NO: 1054768 - DNA, 33 bp, Homo sapien
ccggtactgtcaccgattagatgtgacctatgg

SEQ ID NO: 1054769 - DNA, 33 bp, Homo sapien
tgaccatcatttagaaaggttgagagaatcaaa

SEQ ID NO: 1054770 - DNA, 33 bp, Homo sapien
tgaccatcatttagaagggttgagagaatcaaa

SEQ ID NO: 1054771 - DNA, 33 bp, Homo sapien
gacttgcaactgagcacgttttcaggggctgtg

SEQ ID NO: 1054772 - DNA, 33 bp, Homo sapien
gacttgcaactgagcatgttttcaggggctgtg

SEQ ID NO: 1054773 - DNA, 33 bp, Homo sapien
atgtattctaggatcacacaattgctttcacga

SEQ ID NO: 1054774 - DNA, 33 bp, Homo sapien
atgtattctaggatcatacaattgctttcacga

SEQ ID NO: 1054775 - DNA, 33 bp, Homo sapien
cctcacgctcaaaatgaatattggttgtcataa

SEQ ID NO: 1054776 - DNA, 33 bp, Homo sapien
cctcacgctcaaaatggatattggttgtcataa

SEQ ID NO: 1054777 - DNA, 33 bp, Homo sapien
gacttgtcactataacaaaaggatgaccatcat

SEQ ID NO: 1054778 - DNA, 33 bp, Homo sapien
gacttgtcactataacgaaaggatgaccatcat

SEQ ID NO: 1054779 - DNA, 33 bp, Homo sapien
atattcgttgctgggaacacagagactaataaa

SEQ ID NO: 1054780 - DNA, 33 bp, Homo sapien
atattcgttgctgggatcacagagactaataaa

SEQ ID NO: 1054781 - DNA, 33 bp, Homo sapien
atgtgtaagacttgaccctacttgaaagctaac

SEQ ID NO: 1054782 - DNA, 33 bp, Homo sapien
atgtgtaagacttgactctacttgaaagctaac

SEQ ID NO: 1054783 - DNA, 33 bp, Homo sapien
tttgcctctgtcccaaaactctgtgtcttttgt

SEQ ID NO: 1054784 - DNA, 33 bp, Homo sapien
tttgcctctgtcccaatactctgtgtcttttgt

SEQ ID NO: 1054785 - DNA, 33 bp, Homo sapien
tattctgaaagcataacaaagggtggctaatta

SEQ ID NO: 1054786 - DNA, 33 bp, Homo sapien
tattctgaaagcataagaaagggtggctaatta

SEQ ID NO: 1054787 - DNA, 33 bp, Homo sapien
aaagtgtccacttctacgcatcccctgctaaat

SEQ ID NO: 1054788 - DNA, 33 bp, Homo sapien
aaagtgtccacttctatgcatcccctgctaaat

SEQ ID NO: 1054789 - DNA, 33 bp, Homo sapien
tgctcaactcactatcaatttgagaatacaatg

SEQ ID NO: 1054790 - DNA, 33 bp, Homo sapien
tgctcaactcactatccatttgagaatacaatg

SEQ ID NO: 1054791 - DNA, 33 bp, Homo sapien
taaaggctttcacaaaggttgtcaaaggaattt

SEQ ID NO: 1054792 - DNA, 33 bp, Homo sapien
taaaggctttcacaaatgttgtcaaaggaattt

SEQ ID NO: 1054793 - DNA, 33 bp, Homo sapien
gactttttgccttaaagttgttcctctctgtaa

SEQ ID NO: 1054794 - DNA, 33 bp, Homo sapien
gactttttgccttaaatttgttcctctctgtaa

SEQ ID NO: 1054795 - DNA, 33 bp, Homo sapien
tgcaagcagggttaaactcactacaaattaata

SEQ ID NO: 1054796 - DNA, 33 bp, Homo sapien
tgcaagcagggttaaagtcactacaaattaata

SEQ ID NO: 1054797 - DNA, 33 bp, Homo sapien
gctatatcttcactaccaatgattccatttgta

SEQ ID NO: 1054798 - DNA, 33 bp, Homo sapien
gctatatcttcactactaatgattccatttgta

SEQ ID NO: 1054799 - DNA, 33 bp, Homo sapien
gtctctctggttgcaacagctctttgtcaccat

SEQ ID NO: 1054800 - DNA, 33 bp, Homo sapien
gtctctctggttgcaatagctctttgtcaccat

SEQ ID NO: 1054801 - DNA, 33 bp, Homo sapien
ctgctgctaaatgaccgccccaaaactcaaatc

SEQ ID NO: 1054802 - DNA, 33 bp, Homo sapien
ctgctgctaaatgacctccccaaaactcaaatc

SEQ ID NO: 1054803 - DNA, 33 bp, Homo sapien
aaaataacagctgttaaagaggaaagatacatg

SEQ ID NO: 1054804 - DNA, 33 bp, Homo sapien
aaaataacagctgttacagaggaaagatacatg

SEQ ID NO: 1054805 - DNA, 33 bp, Homo sapien
tacttctctaaggtcacatatataataagcata

SEQ ID NO: 1054806 - DNA, 33 bp, Homo sapien
tacttctctaaggtcatatatataataagcata

SEQ ID NO: 1054807 - DNA, 33 bp, Homo sapien
ctaagtggtcttgccaatcatctcaataatact

SEQ ID NO: 1054808 - DNA, 33 bp, Homo sapien
ctaagtggtcttgccagtcatctcaataatact

SEQ ID NO: 1054809 - DNA, 33 bp, Homo sapien
tagattactgaagatcagaacatttcatagctt

SEQ ID NO: 1054810 - DNA, 33 bp, Homo sapien
tagattactgaagatcggaacatttcatagctt

SEQ ID NO: 1054811 - DNA, 33 bp, Homo sapien
agtaacatacgcaaaaacctctattcaaattaa

SEQ ID NO: 1054812 - DNA, 33 bp, Homo sapien
agtaacatacgcaaaagcctctattcaaattaa

SEQ ID NO: 1054813 - DNA, 33 bp, Homo sapien
aataccattttcataaagtttggcaatcttttc

SEQ ID NO: 1054814 - DNA, 33 bp, Homo sapien
aataccattttcataatgtttggcaatcttttc

SEQ ID NO: 1054815 - DNA, 33 bp, Homo sapien
tttactgcaggattcaacataaggcaggtgtct

SEQ ID NO: 1054816 - DNA, 33 bp, Homo sapien
tttactgcaggattcagcataaggcaggtgtct

SEQ ID NO: 1054817 - DNA, 33 bp, Homo sapien
tactgaactttaaatgcacttgaagttatacct

SEQ ID NO: 1054818 - DNA, 33 bp, Homo sapien
tactgaactttaaatgtacttgaagttatacct

SEQ ID NO: 1054819 - DNA, 33 bp, Homo sapien
gacactgtactcaaaacctttgcatattaaagg

SEQ ID NO: 1054820 - DNA, 33 bp, Homo sapien
gacactgtactcaaaatctttgcatattaaagg

SEQ ID NO: 1054821 - DNA, 33 bp, Homo sapien
catggtgagatttcaaacattcttcacaggaca

SEQ ID NO: 1054822 - DNA, 33 bp, Homo sapien
catggtgagatttcaagcattcttcacaggaca

SEQ ID NO: 1054823 - DNA, 33 bp, Homo sapien
attatatggtttattaagcaaacagatttgcca

SEQ ID NO: 1054824 - DNA, 33 bp, Homo sapien
attatatggtttattatgcaaacagatttgcca

SEQ ID NO: 1054825 - DNA, 33 bp, Homo sapien
cccttcgacatattatcacatagcaagatggct

SEQ ID NO: 1054826 - DNA, 33 bp, Homo sapien
cccttcgacatattatgacatagcaagatggct

SEQ ID NO: 1054827 - DNA, 33 bp, Homo sapien
aatactcagtcacttcaaattgctaaaggcatt

SEQ ID NO: 1054828 - DNA, 33 bp, Homo sapien
aatactcagtcacttccaattgctaaaggcatt

SEQ ID NO: 1054829 - DNA, 33 bp, Homo sapien
cagccaatgtcctccaactaggctttcctgttt

SEQ ID NO: 1054830 - DNA, 33 bp, Homo sapien
cagccaatgtcctccatctaggctttcctgttt

SEQ ID NO: 1054831 - DNA, 33 bp, Homo sapien
tttgtattggagggtaataagacctaaggatgg

SEQ ID NO: 1054832 - DNA, 33 bp, Homo sapien
tttgtattggagggtagtaagacctaaggatgg

SEQ ID NO: 1054833 - DNA, 33 bp, Homo sapien
ataatatccatgggtagagatcatctcactcga

SEQ ID NO: 1054834 - DNA, 33 bp, Homo sapien
ataatatccatgggtatagatcatctcactcga

SEQ ID NO: 1054835 - DNA, 33 bp, Homo sapien
agtaaaatttgatctacacagtcaagtgattgc

SEQ ID NO: 1054836 - DNA, 33 bp, Homo sapien
agtaaaatttgatctatacagtcaagtgattgc

SEQ ID NO: 1054837 - DNA, 33 bp, Homo sapien
attggttaaacgctcaatataggttaggcaata

SEQ ID NO: 1054838 - DNA, 33 bp, Homo sapien
attggttaaacgctcagtataggttaggcaata

SEQ ID NO: 1054839 - DNA, 33 bp, Homo sapien
agtagcaaagagtatacggcaagtgaggtgggg

SEQ ID NO: 1054840 - DNA, 33 bp, Homo sapien
agtagcaaagagtatatggcaagtgaggtgggg

SEQ ID NO: 1054841 - DNA, 33 bp, Homo sapien
ctaatccagtccttacaatgcttatttttcttc

SEQ ID NO: 1054842 - DNA, 33 bp, Homo sapien
ctaatccagtccttacgatgcttatttttcttc

SEQ ID NO: 1054843 - DNA, 33 bp, Homo sapien
catgaatgaaaccgaacgcagagtccatagctt

SEQ ID NO: 1054844 - DNA, 33 bp, Homo sapien
catgaatgaaaccgaaggcagagtccatagctt

SEQ ID NO: 1054845 - DNA, 33 bp, Homo sapien
tttcgcctgaaaaatactaatgaagctatttgg

SEQ ID NO: 1054846 - DNA, 33 bp, Homo sapien
tttcgcctgaaaaatattaatgaagctatttgg

SEQ ID NO: 1054847 - DNA, 33 bp, Homo sapien
ataaaatgcaaacaatgaagatcaaatcaagag

SEQ ID NO: 1054848 - DNA, 33 bp, Homo sapien
ataaaatgcaaacaattaagatcaaatcaagag

SEQ ID NO: 1054849 - DNA, 33 bp, Homo sapien
agacattcttggcccacgatttgtttcacaggg

SEQ ID NO: 1054850 - DNA, 33 bp, Homo sapien
agacattcttggcccatgatttgtttcacaggg

SEQ ID NO: 1054851 - DNA, 33 bp, Homo sapien
atggaaagagttttagcacggaaatagaatatc

SEQ ID NO: 1054852 - DNA, 33 bp, Homo sapien
atggaaagagttttaggacggaaatagaatatc

SEQ ID NO: 1054853 - DNA, 33 bp, Homo sapien
actgatttcagctgcaaataacactacctggct

SEQ ID NO: 1054854 - DNA, 33 bp, Homo sapien
actgatttcagctgcagataacactacctggct

SEQ ID NO: 1054855 - DNA, 33 bp, Homo sapien
tttcccaagttcataggtagtaacaaagaatga

SEQ ID NO: 1054856 - DNA, 33 bp, Homo sapien
tttcccaagttcatagttagtaacaaagaatga

SEQ ID NO: 1054857 - DNA, 33 bp, Homo sapien
tgtacctctagtttcactatacatcaaaaagat

SEQ ID NO: 1054858 - DNA, 33 bp, Homo sapien
tgtacctctagtttcattatacatcaaaaagat

SEQ ID NO: 1054859 - DNA, 33 bp, Homo sapien
tcttcctgagcaagcacagcaggtctgcaatac

SEQ ID NO: 1054860 - DNA, 33 bp, Homo sapien
tcttcctgagcaagcatagcaggtctgcaatac

SEQ ID NO: 1054861 - DNA, 33 bp, Homo sapien
ggattgcaggcactcaaaagtaattgtggcaca

SEQ ID NO: 1054862 - DNA, 33 bp, Homo sapien
ggattgcaggcactcagaagtaattgtggcaca

SEQ ID NO: 1054863 - DNA, 33 bp, Homo sapien
accataagccaccttgaagcagtgatatggaca

SEQ ID NO: 1054864 - DNA, 33 bp, Homo sapien
accataagccaccttggagcagtgatatggaca

SEQ ID NO: 1054865 - DNA, 33 bp, Homo sapien
cttctgtctataagtgaaatgacttttgttcca

SEQ ID NO: 1054866 - DNA, 33 bp, Homo sapien
cttctgtctataagtggaatgacttttgttcca

SEQ ID NO: 1054867 - DNA, 33 bp, Homo sapien
cacttggctaaagcaacgggcttccctgatctg

SEQ ID NO: 1054868 - DNA, 33 bp, Homo sapien
cacttggctaaagcaatgggcttccctgatctg

SEQ ID NO: 1054869 - DNA, 33 bp, Homo sapien
accacacccaagtttcactgacccaagcacgtt

SEQ ID NO: 1054870 - DNA, 33 bp, Homo sapien
accacacccaagtttcgctgacccaagcacgtt

SEQ ID NO: 1054871 - DNA, 33 bp, Homo sapien
ctctgatgatcatttgaaacatatctgtgagaa

SEQ ID NO: 1054872 - DNA, 33 bp, Homo sapien
ctctgatgatcatttggaacatatctgtgagaa

SEQ ID NO: 1054873 - DNA, 33 bp, Homo sapien
tgttgttagcatatcaatgaatactatgagtct

SEQ ID NO: 1054874 - DNA, 33 bp, Homo sapien
tgttgttagcatatcactgaatactatgagtct

SEQ ID NO: 1054875 - DNA, 33 bp, Homo sapien
agagacataatggcaaaactattcttatttggt

SEQ ID NO: 1054876 - DNA, 33 bp, Homo sapien
agagacataatggcaagactattcttatttggt

SEQ ID NO: 1054877 - DNA, 33 bp, Homo sapien
atatcatcaacaagtaagttcaatgtgcctaaa

SEQ ID NO: 1054878 - DNA, 33 bp, Homo sapien
atatcatcaacaagtatgttcaatgtgcctaaa

SEQ ID NO: 1054879 - DNA, 33 bp, Homo sapien
aagccctgacctttcccacatatattggtgtca

SEQ ID NO: 1054880 - DNA, 33 bp, Homo sapien
aagccctgacctttcctacatatattggtgtca

SEQ ID NO: 1054881 - DNA, 33 bp, Homo sapien
ttcaatcaacctcatccatgattaaatatgatt

SEQ ID NO: 1054882 - DNA, 33 bp, Homo sapien
ttcaatcaacctcatctatgattaaatatgatt

SEQ ID NO: 1054883 - DNA, 33 bp, Homo sapien
actgaccatagtatgaagcattctgaaattgcc

SEQ ID NO: 1054884 - DNA, 33 bp, Homo sapien
actgaccatagtatgatgcattctgaaattgcc

SEQ ID NO: 1054885 - DNA, 33 bp, Homo sapien
cattactaatatagaactagcaaagccttccaa

SEQ ID NO: 1054886 - DNA, 33 bp, Homo sapien
cattactaatatagaagtagcaaagccttccaa

SEQ ID NO: 1054887 - DNA, 33 bp, Homo sapien
atagggatcagaaatacagctgattcagttgaa

SEQ ID NO: 1054888 - DNA, 33 bp, Homo sapien
atagggatcagaaatatagctgattcagttgaa

SEQ ID NO: 1054889 - DNA, 33 bp, Homo sapien
tttaagttgcttctaaacgtttcttcttatcac

SEQ ID NO: 1054890 - DNA, 33 bp, Homo sapien
tttaagttgcttctaagcgtttcttcttatcac

SEQ ID NO: 1054891 - DNA, 33 bp, Homo sapien
cagccccattcatgcacgtgaatattttcaggc

SEQ ID NO: 1054892 - DNA, 33 bp, Homo sapien
cagccccattcatgcatgtgaatattttcaggc

SEQ ID NO: 1054893 - DNA, 33 bp, Homo sapien
cacttttcaggttctcaataaatcttgtggaat

SEQ ID NO: 1054894 - DNA, 33 bp, Homo sapien
cacttttcaggttctcgataaatcttgtggaat

SEQ ID NO: 1054895 - DNA, 33 bp, Homo sapien
tataatgtacttccagaatagccctgcttcaat

SEQ ID NO: 1054896 - DNA, 33 bp, Homo sapien
tataatgtacttccaggatagccctgcttcaat

SEQ ID NO: 1054897 - DNA, 33 bp, Homo sapien
atcatcatgtagttagcagttgaagccattcca

SEQ ID NO: 1054898 - DNA, 33 bp, Homo sapien
atcatcatgtagttagtagttgaagccattcca

SEQ ID NO: 1054899 - DNA, 33 bp, Homo sapien
tcagttgctgaggccaaaatcttagaaataatc

SEQ ID NO: 1054900 - DNA, 33 bp, Homo sapien
tcagttgctgaggccagaatcttagaaataatc

SEQ ID NO: 1054901 - DNA, 33 bp, Homo sapien
agaaaaataacagaggaaatctgaatcgagtga

SEQ ID NO: 1054902 - DNA, 33 bp, Homo sapien
agaaaaataacagaggtaatctgaatcgagtga

SEQ ID NO: 1054903 - DNA, 33 bp, Homo sapien
ataacaagaacaagaaataacccaatatctaat

SEQ ID NO: 1054904 - DNA, 33 bp, Homo sapien
ataacaagaacaagaagtaacccaatatctaat

SEQ ID NO: 1054905 - DNA, 33 bp, Homo sapien
taggtatctacctggactattgtttgtgtcaga

SEQ ID NO: 1054906 - DNA, 33 bp, Homo sapien
taggtatctacctggagtattgtttgtgtcaga

SEQ ID NO: 1054907 - DNA, 33 bp, Homo sapien
ttcttggccctcgacactggttttgtccaggat

SEQ ID NO: 1054908 - DNA, 33 bp, Homo sapien
ttcttggccctcgacattggttttgtccaggat

SEQ ID NO: 1054909 - DNA, 33 bp, Homo sapien
cagtccttagcatttccaattccacaacactcc

SEQ ID NO: 1054910 - DNA, 33 bp, Homo sapien
cagtccttagcatttctaattccacaacactcc

SEQ ID NO: 1054911 - DNA, 33 bp, Homo sapien
aaatctaattaaaatgacacctctattcaaggg

SEQ ID NO: 1054912 - DNA, 33 bp, Homo sapien
aaatctaattaaaatggcacctctattcaaggg

SEQ ID NO: 1054913 - DNA, 33 bp, Homo sapien
catttaaatgtagggaataaccagagatgtaat

SEQ ID NO: 1054914 - DNA, 33 bp, Homo sapien
catttaaatgtagggagtaaccagagatgtaat

SEQ ID NO: 1054915 - DNA, 33 bp, Homo sapien
acaacaatctggtccccacacttatcaccccat

SEQ ID NO: 1054916 - DNA, 33 bp, Homo sapien
acaacaatctggtcccgacacttatcaccccat

SEQ ID NO: 1054917 - DNA, 33 bp, Homo sapien
agaagccacaattcaactggatatgtttataca

SEQ ID NO: 1054918 - DNA, 33 bp, Homo sapien
agaagccacaattcaattggatatgtttataca

SEQ ID NO: 1054919 - DNA, 33 bp, Homo sapien
gttgtgataagtaccacaatgtgacacaaagat

SEQ ID NO: 1054920 - DNA, 33 bp, Homo sapien
gttgtgataagtaccataatgtgacacaaagat

SEQ ID NO: 1054921 - DNA, 33 bp, Homo sapien
gaggctgtggtaaatacactttaagtgacatag

SEQ ID NO: 1054922 - DNA, 33 bp, Homo sapien
gaggctgtggtaaatatactttaagtgacatag

SEQ ID NO: 1054923 - DNA, 33 bp, Homo sapien
ccctgtggctctcctaactctcctaagagggta

SEQ ID NO: 1054924 - DNA, 33 bp, Homo sapien
ccctgtggctctcctatctctcctaagagggta

SEQ ID NO: 1054925 - DNA, 33 bp, Homo sapien
ctactatgaacatggaagtacaagtgcctcttt

SEQ ID NO: 1054926 - DNA, 33 bp, Homo sapien
ctactatgaacatggaggtacaagtgcctcttt

SEQ ID NO: 1054927 - DNA, 33 bp, Homo sapien
gctaataataaagaaccgggagaaattattatt

SEQ ID NO: 1054928 - DNA, 33 bp, Homo sapien
gctaataataaagaactgggagaaattattatt

SEQ ID NO: 1054929 - DNA, 33 bp, Homo sapien
cccatgcaggtgcataaatttctgtcttctctg

SEQ ID NO: 1054930 - DNA, 33 bp, Homo sapien
cccatgcaggtgcatacatttctgtcttctctg

SEQ ID NO: 1054931 - DNA, 33 bp, Homo sapien
gagaaagaaagccagaaaaatccattgccaatg

SEQ ID NO: 1054932 - DNA, 33 bp, Homo sapien
gagaaagaaagccagagaaatccattgccaatg

SEQ ID NO: 1054933 - DNA, 33 bp, Homo sapien
aagtatacatgacttgaaagttgactgttgcaa

SEQ ID NO: 1054934 - DNA, 33 bp, Homo sapien
aagtatacatgacttggaagttgactgttgcaa

SEQ ID NO: 1054935 - DNA, 33 bp, Homo sapien
tttttccccacatctacggccccatctgtatgt

SEQ ID NO: 1054936 - DNA, 33 bp, Homo sapien
tttttccccacatctatggccccatctgtatgt

SEQ ID NO: 1054937 - DNA, 33 bp, Homo sapien
ggcactggtatacaaccacagagatgacctcat

SEQ ID NO: 1054938 - DNA, 33 bp, Homo sapien
ggcactggtatacaactacagagatgacctcat

SEQ ID NO: 1054939 - DNA, 33 bp, Homo sapien
attggcattacatttactaaatcaagtcatgta

SEQ ID NO: 1054940 - DNA, 33 bp, Homo sapien
attggcattacatttattaaatcaagtcatgta

SEQ ID NO: 1054941 - DNA, 33 bp, Homo sapien
atcaggggaatgtttccaaatgaagtctgtaat

SEQ ID NO: 1054942 - DNA, 33 bp, Homo sapien
atcaggggaatgtttctaaatgaagtctgtaat

SEQ ID NO: 1054943 - DNA, 33 bp, Homo sapien
aagaacagaggatttcaacaattcagtgcacca

SEQ ID NO: 1054944 - DNA, 33 bp, Homo sapien
aagaacagaggatttccacaattcagtgcacca

SEQ ID NO: 1054945 - DNA, 33 bp, Homo sapien
ccctgaaaggtggaaactgatagacccatacaa

SEQ ID NO: 1054946 - DNA, 33 bp, Homo sapien
ccctgaaaggtggaaagtgatagacccatacaa

SEQ ID NO: 1054947 - DNA, 33 bp, Homo sapien
tcacatacgtataaacaatgtagccaaacacac

SEQ ID NO: 1054948 - DNA, 33 bp, Homo sapien
tcacatacgtataaaccatgtagccaaacacac

SEQ ID NO: 1054949 - DNA, 33 bp, Homo sapien
aaacagctgaaatagaagatgtaggattgaatt

SEQ ID NO: 1054950 - DNA, 33 bp, Homo sapien
aaacagctgaaatagaggatgtaggattgaatt

SEQ ID NO: 1054951 - DNA, 33 bp, Homo sapien
aggaaaagtgaaaggtaacatatattctgagga

SEQ ID NO: 1054952 - DNA, 33 bp, Homo sapien
aggaaaagtgaaaggttacatatattctgagga

SEQ ID NO: 1054953 - DNA, 33 bp, Homo sapien
attgaatgagataaaacgtggtattcttagtgc

SEQ ID NO: 1054954 - DNA, 33 bp, Homo sapien
attgaatgagataaaatgtggtattcttagtgc

SEQ ID NO: 1054955 - DNA, 33 bp, Homo sapien
aggtcataggtgagagacattaaagatgaagca

SEQ ID NO: 1054956 - DNA, 33 bp, Homo sapien
aggtcataggtgagagtcattaaagatgaagca

SEQ ID NO: 1054957 - DNA, 33 bp, Homo sapien
tcagctgttgtctgccactaaagagttttagca

SEQ ID NO: 1054958 - DNA, 33 bp, Homo sapien
tcagctgttgtctgccgctaaagagttttagca

SEQ ID NO: 1054959 - DNA, 33 bp, Homo sapien
cagagcttttcttcaggaatgaccatttttagc

SEQ ID NO: 1054960 - DNA, 33 bp, Homo sapien
cagagcttttcttcagtaatgaccatttttagc

SEQ ID NO: 1054961 - DNA, 33 bp, Homo sapien
gtcttcagctggtaaactcaacattgttagctc

SEQ ID NO: 1054962 - DNA, 33 bp, Homo sapien
gtcttcagctggtaaattcaacattgttagctc

SEQ ID NO: 1054963 - DNA, 33 bp, Homo sapien
tgatagctgctcctaacgactaaaattctttgg

SEQ ID NO: 1054964 - DNA, 33 bp, Homo sapien
tgatagctgctcctaatgactaaaattctttgg

SEQ ID NO: 1054965 - DNA, 33 bp, Homo sapien
caacttctttagtcccgggagaggaagtcaggt

SEQ ID NO: 1054966 - DNA, 33 bp, Homo sapien
caacttctttagtccctggagaggaagtcaggt

SEQ ID NO: 1054967 - DNA, 33 bp, Homo sapien
ggggtaggtctaatgcaacagagaggcccagtc

SEQ ID NO: 1054968 - DNA, 33 bp, Homo sapien
ggggtaggtctaatgcgacagagaggcccagtc

SEQ ID NO: 1054969 - DNA, 33 bp, Homo sapien
ccaggtatactaaccacctattcttctgcccac

SEQ ID NO: 1054970 - DNA, 33 bp, Homo sapien
ccaggtatactaaccatctattcttctgcccac

SEQ ID NO: 1054971 - DNA, 33 bp, Homo sapien
agattggctccttaacaggattcaacatgatga

SEQ ID NO: 1054972 - DNA, 33 bp, Homo sapien
agattggctccttaaccggattcaacatgatga

SEQ ID NO: 1054973 - DNA, 33 bp, Homo sapien
ctttcattttcttaaaacacagagtaaaagcat

SEQ ID NO: 1054974 - DNA, 33 bp, Homo sapien
ctttcattttcttaaagcacagagtaaaagcat

SEQ ID NO: 1054975 - DNA, 33 bp, Homo sapien
cctccctctactgacccgagatgcaggaactca

SEQ ID NO: 1054976 - DNA, 33 bp, Homo sapien
cctccctctactgacctgagatgcaggaactca

SEQ ID NO: 1054977 - DNA, 33 bp, Homo sapien
ccagatatttttcctgcaccagatcttgggtga

SEQ ID NO: 1054978 - DNA, 33 bp, Homo sapien
ccagatatttttcctgtaccagatcttgggtga

SEQ ID NO: 1054979 - DNA, 33 bp, Homo sapien
tgtttcaggtacataacggctttggtttaacat

SEQ ID NO: 1054980 - DNA, 33 bp, Homo sapien
tgtttcaggtacataatggctttggtttaacat

SEQ ID NO: 1054981 - DNA, 33 bp, Homo sapien
ttctttaaacccaataagtcaaaacagaactta

SEQ ID NO: 1054982 - DNA, 33 bp, Homo sapien
ttctttaaacccaatatgtcaaaacagaactta

SEQ ID NO: 1054983 - DNA, 33 bp, Homo sapien
ccagtgtcctaaactacgaactacataacacaa

SEQ ID NO: 1054984 - DNA, 33 bp, Homo sapien
ccagtgtcctaaactatgaactacataacacaa

SEQ ID NO: 1054985 - DNA, 33 bp, Homo sapien
aatttgaccacactgacgcttaatagatggttc

SEQ ID NO: 1054986 - DNA, 33 bp, Homo sapien
aatttgaccacactgatgcttaatagatggttc

SEQ ID NO: 1054987 - DNA, 33 bp, Homo sapien
tttcaaacatttttacacttattgcctaattcc

SEQ ID NO: 1054988 - DNA, 33 bp, Homo sapien
tttcaaacatttttactcttattgcctaattcc

SEQ ID NO: 1054989 - DNA, 33 bp, Homo sapien
tgtgggcactggtttcaaaactacatggtgtta

SEQ ID NO: 1054990 - DNA, 33 bp, Homo sapien
tgtgggcactggtttcgaaactacatggtgtta

SEQ ID NO: 1054991 - DNA, 33 bp, Homo sapien
aatgtggtaaagaataaagaacatgagttttgg

SEQ ID NO: 1054992 - DNA, 33 bp, Homo sapien
aatgtggtaaagaatagagaacatgagttttgg

SEQ ID NO: 1054993 - DNA, 33 bp, Homo sapien
cagagaagttatgtaaactgttttaggtcacac

SEQ ID NO: 1054994 - DNA, 33 bp, Homo sapien
cagagaagttatgtaacctgttttaggtcacac

SEQ ID NO: 1054995 - DNA, 33 bp, Homo sapien
gattaaatttgataaaacttcttaagagccttt

SEQ ID NO: 1054996 - DNA, 33 bp, Homo sapien
gattaaatttgataaagcttcttaagagccttt

SEQ ID NO: 1054997 - DNA, 33 bp, Homo sapien
aatgctagaagggtcacctcaatcaggaaaagc

SEQ ID NO: 1054998 - DNA, 33 bp, Homo sapien
aatgctagaagggtcatctcaatcaggaaaagc

SEQ ID NO: 1054999 - DNA, 33 bp, Homo sapien
ttataaatactgatggaattaaactgagcgctt

SEQ ID NO: 1055000 - DNA, 33 bp, Homo sapien
ttataaatactgatggcattaaactgagcgctt

SEQ ID NO: 1055001 - DNA, 33 bp, Homo sapien
gtcagttttctcgtgacgttttcaaggatgaat

SEQ ID NO: 1055002 - DNA, 33 bp, Homo sapien
gtcagttttctcgtgatgttttcaaggatgaat

SEQ ID NO: 1055003 - DNA, 33 bp, Homo sapien
taaagagtttcagcacagtagaagatactatca

SEQ ID NO: 1055004 - DNA, 33 bp, Homo sapien
taaagagtttcagcaccgtagaagatactatca

SEQ ID NO: 1055005 - DNA, 33 bp, Homo sapien; identical to SEQ ID NO: 1055003

SEQ ID NO: 1055006 - DNA, 33 bp, Homo sapien; identical to SEQ ID NO: 1055004

SEQ ID NO: 1055007 - DNA, 33 bp, Homo sapien
accaattgtaataacagtcattgtcttcaactc

SEQ ID NO: 1055008 - DNA, 33 bp, Homo sapien
accaattgtaataacattcattgtcttcaactc

SEQ ID NO: 1055009 - DNA, 33 bp, Homo sapien
catttcagaatgtgtacgtgtatcaaaccatcg

SEQ ID NO: 1055010 - DNA, 33 bp, Homo sapien
catttcagaatgtgtatgtgtatcaaaccatcg

SEQ ID NO: 1055011 - DNA, 33 bp, Homo sapien
ttggcactatgtgacacggatgctgtattattc

SEQ ID NO: 1055012 - DNA, 33 bp, Homo sapien
ttggcactatgtgacatggatgctgtattattc

SEQ ID NO: 1055013 - DNA, 33 bp, Homo sapien
attcttacaagagtgaagtggttacacattgtg

SEQ ID NO: 1055014 - DNA, 33 bp, Homo sapien
attcttacaagagtgaggtggttacacattgtg

SEQ ID NO: 1055015 - DNA, 33 bp, Homo sapien
tcctcattgcttaaaacaattcactgtgtggat

SEQ ID NO: 1055016 - DNA, 33 bp, Homo sapien
tcctcattgcttaaaataattcactgtgtggat

SEQ ID NO: 1055017 - DNA, 33 bp, Homo sapien
ttaaaatggaatgttcaactcccttatttctac

SEQ ID NO: 1055018 - DNA, 33 bp, Homo sapien
ttaaaatggaatgttccactcccttatttctac

SEQ ID NO: 1055019 - DNA, 33 bp, Homo sapien
attatctactcaggtaggtggcaaccgaaagtc

SEQ ID NO: 1055020 - DNA, 33 bp, Homo sapien
attatctactcaggtatgtggcaaccgaaagtc

SEQ ID NO: 1055021 - DNA, 33 bp, Homo sapien
caagctctcttttataacactgaatctctttcc

SEQ ID NO: 1055022 - DNA, 33 bp, Homo sapien
caagctctcttttatatcactgaatctctttcc

SEQ ID NO: 1055023 - DNA, 33 bp, Homo sapien
gaggaaaatactgtaacgacaatgacaaaattt

SEQ ID NO: 1055024 - DNA, 33 bp, Homo sapien
gaggaaaatactgtaatgacaatgacaaaattt

SEQ ID NO: 1055025 - DNA, 33 bp, Homo sapien
tctaataaggtggagacagccttttttccaaag

SEQ ID NO: 1055026 - DNA, 33 bp, Homo sapien
tctaataaggtggagatagccttttttccaaag

SEQ ID NO: 1055027 - DNA, 33 bp, Homo sapien
ataaaatttccttcttaaaatcagtccttggca

SEQ ID NO: 1055028 - DNA, 33 bp, Homo sapien
ataaaatttccttcttgaaatcagtccttggca

SEQ ID NO: 1055029 - DNA, 33 bp, Homo sapien
ggagaatgggaggtgaatactgctcaaaggtat

SEQ ID NO: 1055030 - DNA, 33 bp, Homo sapien
ggagaatgggaggtgactactgctcaaaggtat

SEQ ID NO: 1055031 - DNA, 33 bp, Homo sapien
acatttccaacataaggctgcctttcatttaag

SEQ ID NO: 1055032 - DNA, 33 bp, Homo sapien
acatttccaacataagtctgcctttcatttaag

SEQ ID NO: 1055033 - DNA, 33 bp, Homo sapien
aacctaaagtctcagaaatctgttcaggggcac

SEQ ID NO: 1055034 - DNA, 33 bp, Homo sapien
aacctaaagtctcagagatctgttcaggggcac

SEQ ID NO: 1055035 - DNA, 33 bp, Homo sapien
taatccactggattcaataaaatgccaaccaaa

SEQ ID NO: 1055036 - DNA, 33 bp, Homo sapien
taatccactggattcagtaaaatgccaaccaaa

SEQ ID NO: 1055037 - DNA, 33 bp, Homo sapien
ttacacagatgtgttagctttgtgactaatcat

SEQ ID NO: 1055038 - DNA, 33 bp, Homo sapien
ttacacagatgtgttatctttgtgactaatcat

SEQ ID NO: 1055039 - DNA, 33 bp, Homo sapien
ccagcaacattcaacaatatatcacaatgatct

SEQ ID NO: 1055040 - DNA, 33 bp, Homo sapien
ccagcaacattcaacagtatatcacaatgatct

SEQ ID NO: 1055041 - DNA, 33 bp, Homo sapien
ttctcttgctgttacaaaaatgctgcaacaaac

SEQ ID NO: 1055042 - DNA, 33 bp, Homo sapien
ttctcttgctgttacagaaatgctgcaacaaac

SEQ ID NO: 1055043 - DNA, 33 bp, Homo sapien
aaacattatataggacacatgatgtttttaatt

SEQ ID NO: 1055044 - DNA, 33 bp, Homo sapien
aaacattatataggacccatgatgtttttaatt

SEQ ID NO: 1055045 - DNA, 33 bp, Homo sapien
gctgatgatctggaccaaggaaaatatctgtca

SEQ ID NO: 1055046 - DNA, 33 bp, Homo sapien
gctgatgatctggaccgaggaaaatatctgtca

SEQ ID NO: 1055047 - DNA, 33 bp, Homo sapien
tatttaggtcagtctacagctaattaaaacccc

SEQ ID NO: 1055048 - DNA, 33 bp, Homo sapien
tatttaggtcagtctatagctaattaaaacccc

SEQ ID NO: 1055049 - DNA, 33 bp, Homo sapien
acattgctcaatctcacctctaatcatccctgg

SEQ ID NO: 1055050 - DNA, 33 bp, Homo sapien
acattgctcaatctcatctctaatcatccctgg

SEQ ID NO: 1055051 - DNA, 33 bp, Homo sapien
taaggtattaatagaccgacgaattatttctct

SEQ ID NO: 1055052 - DNA, 33 bp, Homo sapien
taaggtattaatagactgacgaattatttctct

SEQ ID NO: 1055053 - DNA, 33 bp, Homo sapien
tgatggccaaagactaaatcattccttcctatg

SEQ ID NO: 1055054 - DNA, 33 bp, Homo sapien
tgatggccaaagactagatcattccttcctatg

SEQ ID NO: 1055055 - DNA, 33 bp, Homo sapien
cagccaatagcaataacacatgagacctgtcat

SEQ ID NO: 1055056 - DNA, 33 bp, Homo sapien
cagccaatagcaataagacatgagacctgtcat

SEQ ID NO: 1055057 - DNA, 33 bp, Homo sapien
taatgaaaacgtttgaaatattgcaaaattacc

SEQ ID NO: 1055058 - DNA, 33 bp, Homo sapien
taatgaaaacgtttgagatattgcaaaattacc

SEQ ID NO: 1055059 - DNA, 33 bp, Homo sapien
atgagctttctactaacgaagtgagtggctttc

SEQ ID NO: 1055060 - DNA, 33 bp, Homo sapien
atgagctttctactaatgaagtgagtggctttc

SEQ ID NO: 1055061 - DNA, 33 bp, Homo sapien
gtcaacttgagcctgaacttgtaatgtcaaata

SEQ ID NO: 1055062 - DNA, 33 bp, Homo sapien
gtcaacttgagcctgagcttgtaatgtcaaata

SEQ ID NO: 1055063 - DNA, 33 bp, Homo sapien
gccaatcttacctacacggaaagataagaaaca

SEQ ID NO: 1055064 - DNA, 33 bp, Homo sapien
gccaatcttacctacatggaaagataagaaaca

SEQ ID NO: 1055065 - DNA, 33 bp, Homo sapien
cttcctctcactatacagagtggccgcctagtc

SEQ ID NO: 1055066 - DNA, 33 bp, Homo sapien
cttcctctcactatacggagtggccgcctagtc

SEQ ID NO: 1055067 - DNA, 33 bp, Homo sapien
ggaaaagcaagactaacctcagtgcccctcaag

SEQ ID NO: 1055068 - DNA, 33 bp, Homo sapien
ggaaaagcaagactaatctcagtgcccctcaag

SEQ ID NO: 1055069 - DNA, 33 bp, Homo sapien
tcctcaagggtcttccacattgcagaggcctct

SEQ ID NO: 1055070 - DNA, 33 bp, Homo sapien
tcctcaagggtcttccgcattgcagaggcctct

SEQ ID NO: 1055071 - DNA, 33 bp, Homo sapien
ataaaatcacttgtccaaaagttacactgttgg

SEQ ID NO: 1055072 - DNA, 33 bp, Homo sapien
ataaaatcacttgtccgaaagttacactgttgg

SEQ ID NO: 1055073 - DNA, 33 bp, Homo sapien
gtttgtttcaaagagacgtcttcacaatattga

SEQ ID NO: 1055074 - DNA, 33 bp, Homo sapien
gtttgtttcaaagagatgtcttcacaatattga

SEQ ID NO: 1055075 - DNA, 33 bp, Homo sapien
gctccagaaaagactgatgagtactgtgattta

SEQ ID NO: 1055076 - DNA, 33 bp, Homo sapien
gctccagaaaagactggtgagtactgtgattta

SEQ ID NO: 1055077 - DNA, 33 bp, Homo sapien
ttaaggaacatagatacgaatatggagaaaaat

SEQ ID NO: 1055078 - DNA, 33 bp, Homo sapien
ttaaggaacatagatatgaatatggagaaaaat

SEQ ID NO: 1055079 - DNA, 33 bp, Homo sapien
atacaggagaaagcccaaaatcctggcataggt

SEQ ID NO: 1055080 - DNA, 33 bp, Homo sapien
atacaggagaaagcccgaaatcctggcataggt

SEQ ID NO: 1055081 - DNA, 33 bp, Homo sapien
ggatgcagtgatggtaaccaacaaaaatgtcat

SEQ ID NO: 1055082 - DNA, 33 bp, Homo sapien
ggatgcagtgatggtagccaacaaaaatgtcat

SEQ ID NO: 1055083 - DNA, 33 bp, Homo sapien
gtgctatgggaatcacaaaggaggaaactctaa

SEQ ID NO: 1055084 - DNA, 33 bp, Homo sapien
gtgctatgggaatcacgaaggaggaaactctaa

SEQ ID NO: 1055085 - DNA, 33 bp, Homo sapien
gttgcaagggaaaaaaatattcatgtaagttag

SEQ ID NO: 1055086 - DNA, 33 bp, Homo sapien
gttgcaagggaaaaaagtattcatgtaagttag

SEQ ID NO: 1055087 - DNA, 33 bp, Homo sapien
catcaaatgctggaaacgatgtggagcgataag

SEQ ID NO: 1055088 - DNA, 33 bp, Homo sapien
catcaaatgctggaaaggatgtggagcgataag

SEQ ID NO: 1055089 - DNA, 33 bp, Homo sapien
atcttctttattcactacaggttgttcttggtc

SEQ ID NO: 1055090 - DNA, 33 bp, Homo sapien
atcttctttattcactgcaggttgttcttggtc

SEQ ID NO: 1055091 - DNA, 33 bp, Homo sapien
caaaaaaattacattcacaatatgtacccatag

SEQ ID NO: 1055092 - DNA, 33 bp, Homo sapien
caaaaaaattacattcgcaatatgtacccatag

SEQ ID NO: 1055093 - DNA, 33 bp, Homo sapien
tcatctagagcctcaaataatctctagaatttt

SEQ ID NO: 1055094 - DNA, 33 bp, Homo sapien
tcatctagagcctcaagtaatctctagaatttt

SEQ ID NO: 1055095 - DNA, 33 bp, Homo sapien
aaaaaatctacctgccaattatacgtattcatg

SEQ ID NO: 1055096 - DNA, 33 bp, Homo sapien
aaaaaatctacctgccgattatacgtattcatg

SEQ ID NO: 1055097 - DNA, 33 bp, Homo sapien
agtctatctcttctcacccaaatatattcttgg

SEQ ID NO: 1055098 - DNA, 33 bp, Homo sapien
agtctatctcttctcatccaaatatattcttgg

SEQ ID NO: 1055099 - DNA, 33 bp, Homo sapien
tgatactggacacaaactaagaaaaataagtca

SEQ ID NO: 1055100 - DNA, 33 bp, Homo sapien
tgatactggacacaaagtaagaaaaataagtca

SEQ ID NO: 1055101 - DNA, 33 bp, Homo sapien
gtgtttgagtatgttcaatggaagattccaatg

SEQ ID NO: 1055102 - DNA, 33 bp, Homo sapien
gtgtttgagtatgttcgatggaagattccaatg

SEQ ID NO: 1055103 - DNA, 33 bp, Homo sapien
aaatgtaagacacctacgttaacacttgtagct

SEQ ID NO: 1055104 - DNA, 33 bp, Homo sapien
aaatgtaagacacctatgttaacacttgtagct

SEQ ID NO: 1055105 - DNA, 33 bp, Homo sapien
gacacggatatagaaaactgtgaccaaatttga

SEQ ID NO: 1055106 - DNA, 33 bp, Homo sapien
gacacggatatagaaagctgtgaccaaatttga

SEQ ID NO: 1055107 - DNA, 33 bp, Homo sapien
gacagtggcgtaaaaccagcatttattatctcc

SEQ ID NO: 1055108 - DNA, 33 bp, Homo sapien
gacagtggcgtaaaactagcatttattatctcc

SEQ ID NO: 1055109 - DNA, 33 bp, Homo sapien
ttataacagcaccaaaaggattaaaactcttag

SEQ ID NO: 1055110 - DNA, 33 bp, Homo sapien
ttataacagcaccaaagggattaaaactcttag

SEQ ID NO: 1055111 - DNA, 33 bp, Homo sapien
aaatgtgtctgcgaaacagatttgggagataac

SEQ ID NO: 1055112 - DNA, 33 bp, Homo sapien
aaatgtgtctgcgaaatagatttgggagataac

SEQ ID NO: 1055113 - DNA, 33 bp, Homo sapien
gaatgaatggacctagcagataaaaattaactt

SEQ ID NO: 1055114 - DNA, 33 bp, Homo sapien
gaatgaatggacctaggagataaaaattaactt

SEQ ID NO: 1055115 - DNA, 33 bp, Homo sapien
gtttgcataaactgtaacatttcatactatgat

SEQ ID NO: 1055116 - DNA, 33 bp, Homo sapien
gtttgcataaactgtagcatttcatactatgat

SEQ ID NO: 1055117 - DNA, 33 bp, Homo sapien
ggcaaatattaagacacctcttggctgggtgtg

SEQ ID NO: 1055118 - DNA, 33 bp, Homo sapien
ggcaaatattaagacatctcttggctgggtgtg

SEQ ID NO: 1055119 - DNA, 33 bp, Homo sapien
ataaatgtatgttgaacgatgaattaatcccta

SEQ ID NO: 1055120 - DNA, 33 bp, Homo sapien
ataaatgtatgttgaatgatgaattaatcccta

SEQ ID NO: 1055121 - DNA, 33 bp, Homo sapien
ggggagaggaataccacgtttatgtaaatttct

SEQ ID NO: 1055122 - DNA, 33 bp, Homo sapien
ggggagaggaataccatgtttatgtaaatttct

SEQ ID NO: 1055123 - DNA, 33 bp, Homo sapien
gaggggtcaatacagacggctttgtctatctct

SEQ ID NO: 1055124 - DNA, 33 bp, Homo sapien
gaggggtcaatacagagggctttgtctatctct

SEQ ID NO: 1055125 - DNA, 33 bp, Homo sapien
ttgtgagatagggaaacgtgtgacttatctgcg

SEQ ID NO: 1055126 - DNA, 33 bp, Homo sapien
ttgtgagatagggaaatgtgtgacttatctgcg

SEQ ID NO: 1055127 - DNA, 33 bp, Homo sapien
ctttattctgactaaaaccagtggaaaccagag

SEQ ID NO: 1055128 - DNA, 33 bp, Homo sapien
ctttattctgactaaacccagtggaaaccagag

SEQ ID NO: 1055129 - DNA, 33 bp, Homo sapien
tatttaggaaaaaggaagtggagacaatgaatt

SEQ ID NO: 1055130 - DNA, 33 bp, Homo sapien
tatttaggaaaaaggacgtggagacaatgaatt

SEQ ID NO: 1055131 - DNA, 33 bp, Homo sapien
tccgctgagttgctcacgttagaaacctcaaag

SEQ ID NO: 1055132 - DNA, 33 bp, Homo sapien
tccgctgagttgctcatgttagaaacctcaaag

SEQ ID NO: 1055133 - DNA, 33 bp, Homo sapien
tgacccatgcaatttcaacaatccatgcacatg

SEQ ID NO: 1055134 - DNA, 33 bp, Homo sapien
tgacccatgcaatttcgacaatccatgcacatg

SEQ ID NO: 1055135 - DNA, 33 bp, Homo sapien
cttgaacaaattaagcaagtaaagaatgagtgt

SEQ ID NO: 1055136 - DNA, 33 bp, Homo sapien
cttgaacaaattaagcgagtaaagaatgagtgt

SEQ ID NO: 1055137 - DNA, 33 bp, Homo sapien
gtaacgcaggggcataaagggtcaatatcaatg

SEQ ID NO: 1055138 - DNA, 33 bp, Homo sapien
gtaacgcaggggcatagagggtcaatatcaatg

SEQ ID NO: 1055139 - DNA, 33 bp, Homo sapien
ggctgggtcaggaaaaattagtagaagcttata

SEQ ID NO: 1055140 - DNA, 33 bp, Homo sapien
ggctgggtcaggaaaacttagtagaagcttata

SEQ ID NO: 1055141 - DNA, 33 bp, Homo sapien
ttctttgcatcctttaaagattagataaatgag

SEQ ID NO: 1055142 - DNA, 33 bp, Homo sapien
ttctttgcatcctttacagattagataaatgag

SEQ ID NO: 1055143 - DNA, 33 bp, Homo sapien
atgtgtaatgtaaatgccagaggaccctagagg

SEQ ID NO: 1055144 - DNA, 33 bp, Homo sapien
atgtgtaatgtaaatgtcagaggaccctagagg

SEQ ID NO: 1055145 - DNA, 33 bp, Homo sapien
cagcataaaattgttaaggctctaaaatgtaag

SEQ ID NO: 1055146 - DNA, 33 bp, Homo sapien
cagcataaaattgttatggctctaaaatgtaag

SEQ ID NO: 1055147 - DNA, 33 bp, Homo sapien
ccataactatagagccaccagcatgcaatgcca

SEQ ID NO: 1055148 - DNA, 33 bp, Homo sapien
ccataactatagagccgccagcatgcaatgcca

SEQ ID NO: 1055149 - DNA, 33 bp, Homo sapien
caattccacaaagaccactgaaagtccacaaaa

SEQ ID NO: 1055150 - DNA, 33 bp, Homo sapien
caattccacaaagaccgctgaaagtccacaaaa

SEQ ID NO: 1055151 - DNA, 33 bp, Homo sapien
ggtgattgttgcaccactgaattcgtattcttt

SEQ ID NO: 1055152 - DNA, 33 bp, Homo sapien
ggtgattgttgcaccattgaattcgtattcttt

SEQ ID NO: 1055153 - DNA, 33 bp, Homo sapien
gcattttatacacagaacaaatctcatctgatg

SEQ ID NO: 1055154 - DNA, 33 bp, Homo sapien
gcattttatacacagagcaaatctcatctgatg

SEQ ID NO: 1055155 - DNA, 33 bp, Homo sapien
agggacaatcaaaatgaattcaatcatgctgat

SEQ ID NO: 1055156 - DNA, 33 bp, Homo sapien
agggacaatcaaaatggattcaatcatgctgat

SEQ ID NO: 1055157 - DNA, 33 bp, Homo sapien
gtctccagagagcttccaagttagtggtaatgc

SEQ ID NO: 1055158 - DNA, 33 bp, Homo sapien
gtctccagagagcttctaagttagtggtaatgc

SEQ ID NO: 1055159 - DNA, 33 bp, Homo sapien
gctataatttgcagataatctacagcttttgtc

SEQ ID NO: 1055160 - DNA, 33 bp, Homo sapien
gctataatttgcagatcatctacagcttttgtc

SEQ ID NO: 1055161 - DNA, 33 bp, Homo sapien
agcaatgctttggtcacgtcaaatgtgagatgt

SEQ ID NO: 1055162 - DNA, 33 bp, Homo sapien
agcaatgctttggtcatgtcaaatgtgagatgt

SEQ ID NO: 1055163 - DNA, 33 bp, Homo sapien
agctgtcaagacaaagcctcagagaaattaaag

SEQ ID NO: 1055164 - DNA, 33 bp, Homo sapien
agctgtcaagacaaaggctcagagaaattaaag

SEQ ID NO: 1055165 - DNA, 33 bp, Homo sapien
aagaaagattcaataaaacaggtaagactatct

SEQ ID NO: 1055166 - DNA, 33 bp, Homo sapien
aagaaagattcaataatacaggtaagactatct

SEQ ID NO: 1055167 - DNA, 33 bp, Homo sapien
ttggtggttaagtaaaatcagcttgttgaggca

SEQ ID NO: 1055168 - DNA, 33 bp, Homo sapien
ttggtggttaagtaaagtcagcttgttgaggca

SEQ ID NO: 1055169 - DNA, 33 bp, Homo sapien
gcaaaggccaggatacaagtagcagcatcccga

SEQ ID NO: 1055170 - DNA, 33 bp, Homo sapien
gcaaaggccaggatacgagtagcagcatcccga

SEQ ID NO: 1055171 - DNA, 33 bp, Homo sapien
gggatagactgtaaaaaatgtaagcacatacgc

SEQ ID NO: 1055172 - DNA, 33 bp, Homo sapien
gggatagactgtaaaagatgtaagcacatacgc

SEQ ID NO: 1055173 - DNA, 33 bp, Homo sapien
ctgtactttccagatacgattgatttcacaccc

SEQ ID NO: 1055174 - DNA, 33 bp, Homo sapien
ctgtactttccagatatgattgatttcacaccc

SEQ ID NO: 1055175 - DNA, 33 bp, Homo sapien
tgacatttttccatgtaaacaccagtagcctga

SEQ ID NO: 1055176 - DNA, 33 bp, Homo sapien
tgacatttttccatgttaacaccagtagcctga

SEQ ID NO: 1055177 - DNA, 33 bp, Homo sapien
aattgctttacattccaaattactctagaccct

SEQ ID NO: 1055178 - DNA, 33 bp, Homo sapien
aattgctttacattccgaattactctagaccct

SEQ ID NO: 1055179 - DNA, 33 bp, Homo sapien
gtctcagaatctcttcactcttgacaatcagca

SEQ ID NO: 1055180 - DNA, 33 bp, Homo sapien
gtctcagaatctcttcgctcttgacaatcagca

SEQ ID NO: 1055181 - DNA, 33 bp, Homo sapien
aaaacagctgtagcaaccatgaactttgttttt

SEQ ID NO: 1055182 - DNA, 33 bp, Homo sapien
aaaacagctgtagcaatcatgaactttgttttt

SEQ ID NO: 1055183 - DNA, 33 bp, Homo sapien
ttaattatctgaaatgaaagcaatctacttaga

SEQ ID NO: 1055184 - DNA, 33 bp, Homo sapien
ttaattatctgaaatggaagcaatctacttaga

SEQ ID NO: 1055185 - DNA, 33 bp, Homo sapien
tatcgccttgatttaccaggaaattacaggaaa

SEQ ID NO: 1055186 - DNA, 33 bp, Homo sapien
tatcgccttgatttactaggaaattacaggaaa

SEQ ID NO: 1055187 - DNA, 33 bp, Homo sapien
attaacagatcaataactacacatccaaaggac

SEQ ID NO: 1055188 - DNA, 33 bp, Homo sapien
attaacagatcaataagtacacatccaaaggac

SEQ ID NO: 1055189 - DNA, 33 bp, Homo sapien
ataactgataaaaaggaaaactgtcaaggaatt

SEQ ID NO: 1055190 - DNA, 33 bp, Homo sapien
ataactgataaaaaggcaaactgtcaaggaatt

SEQ ID NO: 1055191 - DNA, 33 bp, Homo sapien
caccaaaagctcttaacgtaggcaacgcagtgt

SEQ ID NO: 1055192 - DNA, 33 bp, Homo sapien
caccaaaagctcttaatgtaggcaacgcagtgt

SEQ ID NO: 1055193 - DNA, 33 bp, Homo sapien
catgtgtttggccatactatctacctcaaacat

SEQ ID NO: 1055194 - DNA, 33 bp, Homo sapien
catgtgtttggccatattatctacctcaaacat

SEQ ID NO: 1055195 - DNA, 33 bp, Homo sapien
taaggctgtgcaaaataaacgtgaaaacgtctt

SEQ ID NO: 1055196 - DNA, 33 bp, Homo sapien
taaggctgtgcaaaatgaacgtgaaaacgtctt

SEQ ID NO: 1055197 - DNA, 33 bp, Homo sapien
ggaatttctagcaaacagatttacctatcaata

SEQ ID NO: 1055198 - DNA, 33 bp, Homo sapien
ggaatttctagcaaaccgatttacctatcaata

SEQ ID NO: 1055199 - DNA, 33 bp, Homo sapien
gggtggttatgaaaccagagtaggaaaggtctg

SEQ ID NO: 1055200 - DNA, 33 bp, Homo sapien
gggtggttatgaaaccggagtaggaaaggtctg

SEQ ID NO: 1055201 - DNA, 33 bp, Homo sapien
gtatatatggtatagtaacagcacattgtaaat

SEQ ID NO: 1055202 - DNA, 33 bp, Homo sapien
gtatatatggtatagtgacagcacattgtaaat

SEQ ID NO: 1055203 - DNA, 33 bp, Homo sapien
atgtaagtcgtgtatactaatgctgtattcttt

SEQ ID NO: 1055204 - DNA, 33 bp, Homo sapien
atgtaagtcgtgtatattaatgctgtattcttt

SEQ ID NO: 1055205 - DNA, 33 bp, Homo sapien
ctacaatgcaatggaaattcaaccaacttgacc

SEQ ID NO: 1055206 - DNA, 33 bp, Homo sapien
ctacaatgcaatggaagttcaaccaacttgacc

SEQ ID NO: 1055207 - DNA, 33 bp, Homo sapien
aacagatcttctctaacgctaatacaagaaagt

SEQ ID NO: 1055208 - DNA, 33 bp, Homo sapien
aacagatcttctctaatgctaatacaagaaagt

SEQ ID NO: 1055209 - DNA, 33 bp, Homo sapien
tcatgtgtatttcccaataaagctgctatttct

SEQ ID NO: 1055210 - DNA, 33 bp, Homo sapien
tcatgtgtatttcccattaaagctgctatttct

SEQ ID NO: 1055211 - DNA, 33 bp, Homo sapien
aatgataaactgacgaaaaagacttcctagtgc

SEQ ID NO: 1055212 - DNA, 33 bp, Homo sapien
aatgataaactgacgagaaagacttcctagtgc

SEQ ID NO: 1055213 - DNA, 33 bp, Homo sapien
gtatttccccaggcacacttagcacttgggagc

SEQ ID NO: 1055214 - DNA, 33 bp, Homo sapien
gtatttccccaggcacgcttagcacttgggagc

SEQ ID NO: 1055215 - DNA, 33 bp, Homo sapien
atatataatcaaataaatcatccacaagcccat

SEQ ID NO: 1055216 - DNA, 33 bp, Homo sapien
atatataatcaaataagtcatccacaagcccat

SEQ ID NO: 1055217 - DNA, 33 bp, Homo sapien
tggagctgagttcctgaaataaatgtagcccag

SEQ ID NO: 1055218 - DNA, 33 bp, Homo sapien
tggagctgagttcctggaataaatgtagcccag

SEQ ID NO: 1055219 - DNA, 33 bp, Homo sapien
tattagctagaaagaacaataatgacctcatta

SEQ ID NO: 1055220 - DNA, 33 bp, Homo sapien
tattagctagaaagaataataatgacctcatta

SEQ ID NO: 1055221 - DNA, 33 bp, Homo sapien
agatctctttagtgctaacgtcatttctccacc

SEQ ID NO: 1055222 - DNA, 33 bp, Homo sapien
agatctctttagtgctcacgtcatttctccacc

SEQ ID NO: 1055223 - DNA, 33 bp, Homo sapien
taatcatatgttttgaaagtcaaattaagattc

SEQ ID NO: 1055224 - DNA, 33 bp, Homo sapien
taatcatatgttttgacagtcaaattaagattc

SEQ ID NO: 1055225 - DNA, 33 bp, Homo sapien
aaatggatgccaaaatgaaccacagtagaaatt

SEQ ID NO: 1055226 - DNA, 33 bp, Homo sapien
aaatggatgccaaaattaaccacagtagaaatt

SEQ ID NO: 1055227 - DNA, 33 bp, Homo sapien
atgcatgaataatgagcccaagatagaacacaa

SEQ ID NO: 1055228 - DNA, 33 bp, Homo sapien
atgcatgaataatgagtccaagatagaacacaa

SEQ ID NO: 1055229 - DNA, 33 bp, Homo sapien
ttctgatgtaaagtgacagaggtatggctcttt

SEQ ID NO: 1055230 - DNA, 33 bp, Homo sapien
ttctgatgtaaagtgagagaggtatggctcttt

SEQ ID NO: 1055231 - DNA, 33 bp, Homo sapien
agccagacctattgccagaggtagaatgaaaaa

SEQ ID NO: 1055232 - DNA, 33 bp, Homo sapien
agccagacctattgccggaggtagaatgaaaaa

SEQ ID NO: 1055233 - DNA, 33 bp, Homo sapien
atttattagatatttacgctcttttttgagaca

SEQ ID NO: 1055234 - DNA, 33 bp, Homo sapien
atttattagatatttatgctcttttttgagaca

SEQ ID NO: 1055235 - DNA, 33 bp, Homo sapien
ttttgaagatcctagactattaaacaccagcta

SEQ ID NO: 1055236 - DNA, 33 bp, Homo sapien
ttttgaagatcctagattattaaacaccagcta

SEQ ID NO: 1055237 - DNA, 33 bp, Homo sapien
acaacagaacaaacacacagcttagacaaaagc

SEQ ID NO: 1055238 - DNA, 33 bp, Homo sapien
acaacagaacaaacactcagcttagacaaaagc

SEQ ID NO: 1055239 - DNA, 33 bp, Homo sapien
acctccaatgcatcagcaagacctgtgattgtt

SEQ ID NO: 1055240 - DNA, 33 bp, Homo sapien
acctccaatgcatcagtaagacctgtgattgtt

SEQ ID NO: 1055241 - DNA, 33 bp, Homo sapien
gagtaaggtaagtggtaaatcctaagacataca

SEQ ID NO: 1055242 - DNA, 33 bp, Homo sapien
gagtaaggtaagtggtgaatcctaagacataca

SEQ ID NO: 1055243 - DNA, 33 bp, Homo sapien
caataaagaaaaaaacggctatcagtcgggcgt

SEQ ID NO: 1055244 - DNA, 33 bp, Homo sapien
caataaagaaaaaaactgctatcagtcgggcgt

SEQ ID NO: 1055245 - DNA, 33 bp, Homo sapien
aataagtggagtgttacaaggattaaatgggaa

SEQ ID NO: 1055246 - DNA, 33 bp, Homo sapien
aataagtggagtgttataaggattaaatgggaa

SEQ ID NO: 1055247 - DNA, 33 bp, Homo sapien
aaaaagaacaaaaataagtttacagtgacagtg

SEQ ID NO: 1055248 - DNA, 33 bp, Homo sapien
aaaaagaacaaaaatacgtttacagtgacagtg

SEQ ID NO: 1055249 - DNA, 33 bp, Homo sapien
tacaaagctttgcgcaacagaaatggtgggatc

SEQ ID NO: 1055250 - DNA, 33 bp, Homo sapien
tacaaagctttgcgcagcagaaatggtgggatc

SEQ ID NO: 1055251 - DNA, 33 bp, Homo sapien
acactactcagaaaataaaggcatttgtgagtt

SEQ ID NO: 1055252 - DNA, 33 bp, Homo sapien
acactactcagaaaatgaaggcatttgtgagtt

SEQ ID NO: 1055253 - DNA, 33 bp, Homo sapien
ttcaagctctccaagaaaaagcatctgattgga

SEQ ID NO: 1055254 - DNA, 33 bp, Homo sapien
ttcaagctctccaagacaaagcatctgattgga

SEQ ID NO: 1055255 - DNA, 33 bp, Homo sapien
accttaatctctaaaacgtcaggatagtattag

SEQ ID NO: 1055256 - DNA, 33 bp, Homo sapien
accttaatctctaaaatgtcaggatagtattag

SEQ ID NO: 1055257 - DNA, 33 bp, Homo sapien
agcccagaggtgttgaaagaaaaatttaggtta

SEQ ID NO: 1055258 - DNA, 33 bp, Homo sapien
agcccagaggtgttgagagaaaaatttaggtta

SEQ ID NO: 1055259 - DNA, 33 bp, Homo sapien
aacattctttaacatgacaattccacctttagg

SEQ ID NO: 1055260 - DNA, 33 bp, Homo sapien
aacattctttaacatggcaattccacctttagg

SEQ ID NO: 1055261 - DNA, 33 bp, Homo sapien
tttgacaaatttttaaagaagcaatattgatta

SEQ ID NO: 1055262 - DNA, 33 bp, Homo sapien
tttgacaaatttttaaggaagcaatattgatta

SEQ ID NO: 1055263 - DNA, 33 bp, Homo sapien
tccccatgtggaaatacactgctaggcaatgtg

SEQ ID NO: 1055264 - DNA, 33 bp, Homo sapien
tccccatgtggaaatatactgctaggcaatgtg

SEQ ID NO: 1055265 - DNA, 33 bp, Homo sapien
tacctcagattatcgcccagggaagtgtaccta

SEQ ID NO: 1055266 - DNA, 33 bp, Homo sapien
tacctcagattatcgctcagggaagtgtaccta

SEQ ID NO: 1055267 - DNA, 33 bp, Homo sapien
tatacgctaacaatcacgagattcctccctcac

SEQ ID NO: 1055268 - DNA, 33 bp, Homo sapien
tatacgctaacaatcaggagattcctccctcac

SEQ ID NO: 1055269 - DNA, 33 bp, Homo sapien
ttgacaatttcaggtaaaatgcagaaaatatac

SEQ ID NO: 1055270 - DNA, 33 bp, Homo sapien
ttgacaatttcaggtagaatgcagaaaatatac

SEQ ID NO: 1055271 - DNA, 33 bp, Homo sapien
atgactgcagctgagacgaattagagacttttg

SEQ ID NO: 1055272 - DNA, 33 bp, Homo sapien
atgactgcagctgagatgaattagagacttttg

SEQ ID NO: 1055273 - DNA, 33 bp, Homo sapien
gagaaccactagtgtacagtaaactttcaccct

SEQ ID NO: 1055274 - DNA, 33 bp, Homo sapien
gagaaccactagtgtatagtaaactttcaccct

SEQ ID NO: 1055275 - DNA, 33 bp, Homo sapien
tttggagaattaatgcagcagttggtaaaatca

SEQ ID NO: 1055276 - DNA, 33 bp, Homo sapien
tttggagaattaatgccgcagttggtaaaatca

SEQ ID NO: 1055277 - DNA, 33 bp, Homo sapien
tctctttttcccctcccaacttctgcacagtgt

SEQ ID NO: 1055278 - DNA, 33 bp, Homo sapien
tctctttttcccctcctaacttctgcacagtgt

SEQ ID NO: 1055279 - DNA, 33 bp, Homo sapien
catgcataaagtgaagactcctttctgggctga

SEQ ID NO: 1055280 - DNA, 33 bp, Homo sapien
catgcataaagtgaaggctcctttctgggctga

SEQ ID NO: 1055281 - DNA, 33 bp, Homo sapien
ccttgatctgtttatgaaaaggcggtataggaa

SEQ ID NO: 1055282 - DNA, 33 bp, Homo sapien
ccttgatctgtttatggaaaggcggtataggaa

SEQ ID NO: 1055283 - DNA, 33 bp, Homo sapien
ctaatggtggcctaaaataagttctgatgtcct

SEQ ID NO: 1055284 - DNA, 33 bp, Homo sapien
ctaatggtggcctaaagtaagttctgatgtcct

SEQ ID NO: 1055285 - DNA, 33 bp, Homo sapien
acttttctgaacttgactacgcagcgtcttttc

SEQ ID NO: 1055286 - DNA, 33 bp, Homo sapien
acttttctgaacttgattacgcagcgtcttttc

SEQ ID NO: 1055287 - DNA, 33 bp, Homo sapien
gataaggtctgtgaaactgcttccgaaactatc

SEQ ID NO: 1055288 - DNA, 33 bp, Homo sapien
gataaggtctgtgaaagtgcttccgaaactatc

SEQ ID NO: 1055289 - DNA, 33 bp, Homo sapien
gtataaatttgaaaataattttagtgagcatta

SEQ ID NO: 1055290 - DNA, 33 bp, Homo sapien
gtataaatttgaaaatcattttagtgagcatta

SEQ ID NO: 1055291 - DNA, 33 bp, Homo sapien
aaaaggattgcaaaaacgtcctttaatatccaa

SEQ ID NO: 1055292 - DNA, 33 bp, Homo sapien
aaaaggattgcaaaaatgtcctttaatatccaa

SEQ ID NO: 1055293 - DNA, 33 bp, Homo sapien
atggctttatgctttcaatgtggaaggcatttc

SEQ ID NO: 1055294 - DNA, 33 bp, Homo sapien
atggctttatgctttcgatgtggaaggcatttc

SEQ ID NO: 1055295 - DNA, 33 bp, Homo sapien
aagcctatgggcaaaaaaacaatggaaaatcct

SEQ ID NO: 1055296 - DNA, 33 bp, Homo sapien
aagcctatgggcaaaagaacaatggaaaatcct

SEQ ID NO: 1055297 - DNA, 33 bp, Homo sapien
aaataggacagctcaagttatgtttttcagcag

SEQ ID NO: 1055298 - DNA, 33 bp, Homo sapien
aaataggacagctcaatttatgtttttcagcag

SEQ ID NO: 1055299 - DNA, 33 bp, Homo sapien
tgttgctgttaaattaaattaaattgggcctaa

SEQ ID NO: 1055300 - DNA, 33 bp, Homo sapien
tgttgctgttaaattacattaaattgggcctaa

SEQ ID NO: 1055301 - DNA, 33 bp, Homo sapien
gggattcttgcagaacaaagtttggtcaaatat

SEQ ID NO: 1055302 - DNA, 33 bp, Homo sapien
gggattcttgcagaacgaagtttggtcaaatat

SEQ ID NO: 1055303 - DNA, 33 bp, Homo sapien
actgactgaatgcaagcataacatatagggagg

SEQ ID NO: 1055304 - DNA, 33 bp, Homo sapien
actgactgaatgcaaggataacatatagggagg

SEQ ID NO: 1055305 - DNA, 33 bp, Homo sapien
tagtacaatacagtgactaagaatctagaacct

SEQ ID NO: 1055306 - DNA, 33 bp, Homo sapien
tagtacaatacagtgattaagaatctagaacct

SEQ ID NO: 1055307 - DNA, 33 bp, Homo sapien
ctccttgcattcacggaaatgtttctatgtagt

SEQ ID NO: 1055308 - DNA, 33 bp, Homo sapien
ctccttgcattcacgggaatgtttctatgtagt

SEQ ID NO: 1055309 - DNA, 33 bp, Homo sapien
ttattattaacaacaaccacgtatcttgttgaa

SEQ ID NO: 1055310 - DNA, 33 bp, Homo sapien
ttattattaacaacaatcacgtatcttgttgaa

SEQ ID NO: 1055311 - DNA, 33 bp, Homo sapien
gaagagggtgttagagaactaaaggagaaaatt

SEQ ID NO: 1055312 - DNA, 33 bp, Homo sapien
gaagagggtgttagaggactaaaggagaaaatt

SEQ ID NO: 1055313 - DNA, 33 bp, Homo sapien
tccaaatgattcttccaatgcaaaaaggtccca

SEQ ID NO: 1055314 - DNA, 33 bp, Homo sapien
tccaaatgattcttccgatgcaaaaaggtccca

SEQ ID NO: 1055315 - DNA, 33 bp, Homo sapien
attcagtcctatctgacggttgttcctaagctt

SEQ ID NO: 1055316 - DNA, 33 bp, Homo sapien
attcagtcctatctgatggttgttcctaagctt

SEQ ID NO: 1055317 - DNA, 33 bp, Homo sapien
atattgcaaaccagaacagtctgcttgaaaacc

SEQ ID NO: 1055318 - DNA, 33 bp, Homo sapien
atattgcaaaccagaatagtctgcttgaaaacc

SEQ ID NO: 1055319 - DNA, 33 bp, Homo sapien
gagtaaagagtgggaagaaaatgaaatctgtca

SEQ ID NO: 1055320 - DNA, 33 bp, Homo sapien
gagtaaagagtgggaataaaatgaaatctgtca

SEQ ID NO: 1055321 - DNA, 33 bp, Homo sapien
cacttttcagatcctcacactatttgaaagccc

SEQ ID NO: 1055322 - DNA, 33 bp, Homo sapien
cacttttcagatcctcgcactatttgaaagccc

SEQ ID NO: 1055323 - DNA, 33 bp, Homo sapien
tggagaaaaacttccaatgaagctctggagaat

SEQ ID NO: 1055324 - DNA, 33 bp, Homo sapien
tggagaaaaacttccagtgaagctctggagaat

SEQ ID NO: 1055325 - DNA, 33 bp, Homo sapien
cagtcagacagttagacaaaggcctctgaggtt

SEQ ID NO: 1055326 - DNA, 33 bp, Homo sapien
cagtcagacagttagataaaggcctctgaggtt

SEQ ID NO: 1055327 - DNA, 33 bp, Homo sapien
tgtgctgtgctttatacgaattggatgaggaac

SEQ ID NO: 1055328 - DNA, 33 bp, Homo sapien
tgtgctgtgctttatatgaattggatgaggaac

SEQ ID NO: 1055329 - DNA, 33 bp, Homo sapien
ggtagaacctgtcaaacggataaaccaacatca

SEQ ID NO: 1055330 - DNA, 33 bp, Homo sapien
ggtagaacctgtcaaatggataaaccaacatca

SEQ ID NO: 1055331 - DNA, 33 bp, Homo sapien
tggctaaaacaaacagcagcttttttctcatat

SEQ ID NO: 1055332 - DNA, 33 bp, Homo sapien
tggctaaaacaaacaggagcttttttctcatat

SEQ ID NO: 1055333 - DNA, 33 bp, Homo sapien
tgttaggcctccaaaactcaaaagctttcttta

SEQ ID NO: 1055334 - DNA, 33 bp, Homo sapien
tgttaggcctccaaaattcaaaagctttcttta

SEQ ID NO: 1055335 - DNA, 33 bp, Homo sapien
gattatgggagacaaactaatgtgcttaacatg

SEQ ID NO: 1055336 - DNA, 33 bp, Homo sapien
gattatgggagacaaagtaatgtgcttaacatg

SEQ ID NO: 1055337 - DNA, 33 bp, Homo sapien
ctgcttgtagctataacaggttgacagcaggtg

SEQ ID NO: 1055338 - DNA, 33 bp, Homo sapien
ctgcttgtagctataataggttgacagcaggtg

SEQ ID NO: 1055339 - DNA, 33 bp, Homo sapien
cgagactcggagagctaacgtaacttgtctagg

SEQ ID NO: 1055340 - DNA, 33 bp, Homo sapien
cgagactcggagagcttacgtaacttgtctagg

SEQ ID NO: 1055341 - DNA, 33 bp, Homo sapien
actgagcatagtaaccaatagttagtttttcaa

SEQ ID NO: 1055342 - DNA, 33 bp, Homo sapien
actgagcatagtaaccgatagttagtttttcaa

SEQ ID NO: 1055343 - DNA, 33 bp, Homo sapien
tacgagaaagtgtagcagaacatttgagtagat

SEQ ID NO: 1055344 - DNA, 33 bp, Homo sapien
tacgagaaagtgtagcggaacatttgagtagat

SEQ ID NO: 1055345 - DNA, 33 bp, Homo sapien
attttagctattttcacgagaagataatggagg

SEQ ID NO: 1055346 - DNA, 33 bp, Homo sapien
attttagctattttcatgagaagataatggagg

SEQ ID NO: 1055347 - DNA, 33 bp, Homo sapien
gtggagaaacagactacggctcttaatgggaga

SEQ ID NO: 1055348 - DNA, 33 bp, Homo sapien
gtggagaaacagactatggctcttaatgggaga

SEQ ID NO: 1055349 - DNA, 33 bp, Homo sapien
aaacaggtaacacttacgtaggaaaaattgctt

SEQ ID NO: 1055350 - DNA, 33 bp, Homo sapien
aaacaggtaacacttatgtaggaaaaattgctt

SEQ ID NO: 1055351 - DNA, 33 bp, Homo sapien
ttcaattccacttttacgtcagattgaatggga

SEQ ID NO: 1055352 - DNA, 33 bp, Homo sapien
ttcaattccacttttatgtcagattgaatggga

SEQ ID NO: 1055353 - DNA, 33 bp, Homo sapien
aacttgtttcagttgacattcatgtgacagtct

SEQ ID NO: 1055354 - DNA, 33 bp, Homo sapien
aacttgtttcagttgatattcatgtgacagtct

SEQ ID NO: 1055355 - DNA, 33 bp, Homo sapien
taaatctgaagcattacagtaaaacccagtgtg

SEQ ID NO: 1055356 - DNA, 33 bp, Homo sapien
taaatctgaagcattatagtaaaacccagtgtg

SEQ ID NO: 1055357 - DNA, 33 bp, Homo sapien
ctatggcattgatgcaaatcttccaggccagat

SEQ ID NO: 1055358 - DNA, 33 bp, Homo sapien
ctatggcattgatgcacatcttccaggccagat

SEQ ID NO: 1055359 - DNA, 33 bp, Homo sapien
ttatatgaggaacatgaaattcaaagcaccctt

SEQ ID NO: 1055360 - DNA, 33 bp, Homo sapien
ttatatgaggaacatggaattcaaagcaccctt

SEQ ID NO: 1055361 - DNA, 33 bp, Homo sapien
aaaagattggaaattacacagttctgagcttat

SEQ ID NO: 1055362 - DNA, 33 bp, Homo sapien
aaaagattggaaattatacagttctgagcttat

SEQ ID NO: 1055363 - DNA, 33 bp, Homo sapien
ctgagaaaccctgattgaaactcacattacatc

SEQ ID NO: 1055364 - DNA, 33 bp, Homo sapien
ctgagaaaccctgatttaaactcacattacatc

SEQ ID NO: 1055365 - DNA, 33 bp, Homo sapien
acatatattttgaaaaagaaacaccgtagggcc

SEQ ID NO: 1055366 - DNA, 33 bp, Homo sapien
acatatattttgaaaaggaaacaccgtagggcc

SEQ ID NO: 1055367 - DNA, 33 bp, Homo sapien
tcttatgtcagataaacagtatacctctagctc

SEQ ID NO: 1055368 - DNA, 33 bp, Homo sapien
tcttatgtcagataaatagtatacctctagctc

SEQ ID NO: 1055369 - DNA, 33 bp, Homo sapien
atgggagatgaataaaaaggtttataagaaatc

SEQ ID NO: 1055370 - DNA, 33 bp, Homo sapien
atgggagatgaataaagaggtttataagaaatc

SEQ ID NO: 1055371 - DNA, 33 bp, Homo sapien
tatgagattaggttcccaaaatataatgtctgg

SEQ ID NO: 1055372 - DNA, 33 bp, Homo sapien
tatgagattaggttcctaaaatataatgtctgg

SEQ ID NO: 1055373 - DNA, 33 bp, Homo sapien
gatatgtctttgttaacagtgtgagagcagact

SEQ ID NO: 1055374 - DNA, 33 bp, Homo sapien
gatatgtctttgttaatagtgtgagagcagact

SEQ ID NO: 1055375 - DNA, 33 bp, Homo sapien
aggaaaactactgtaccagctcatcttcctacc

SEQ ID NO: 1055376 - DNA, 33 bp, Homo sapien
aggaaaactactgtactagctcatcttcctacc

SEQ ID NO: 1055377 - DNA, 33 bp, Homo sapien
atgagagatcaattaaacatggaggccagaaat

SEQ ID NO: 1055378 - DNA, 33 bp, Homo sapien
atgagagatcaattaatcatggaggccagaaat

SEQ ID NO: 1055379 - DNA, 33 bp, Homo sapien
gtctctccacctataagaatctttcctcttctc

SEQ ID NO: 1055380 - DNA, 33 bp, Homo sapien
gtctctccacctataataatctttcctcttctc

SEQ ID NO: 1055381 - DNA, 33 bp, Homo sapien
atatgaaagatgtaggaaattaagcttggagtt

SEQ ID NO: 1055382 - DNA, 33 bp, Homo sapien
atatgaaagatgtagggaattaagcttggagtt

SEQ ID NO: 1055383 - DNA, 33 bp, Homo sapien
gtattgttgtaatgtcaaaattaccattcagtt

SEQ ID NO: 1055384 - DNA, 33 bp, Homo sapien
gtattgttgtaatgtccaaattaccattcagtt

SEQ ID NO: 1055385 - DNA, 33 bp, Homo sapien
tactaaatcacacctcacttctacagctaaaag

SEQ ID NO: 1055386 - DNA, 33 bp, Homo sapien
tactaaatcacacctcgcttctacagctaaaag

SEQ ID NO: 1055387 - DNA, 33 bp, Homo sapien
aaaagacaatgagaacagctgcatttgtaatta

SEQ ID NO: 1055388 - DNA, 33 bp, Homo sapien
aaaagacaatgagaacggctgcatttgtaatta

SEQ ID NO: 1055389 - DNA, 33 bp, Homo sapien
tttgttgtggctagaaaaaatgatgatggtgaa

SEQ ID NO: 1055390 - DNA, 33 bp, Homo sapien
tttgttgtggctagaagaaatgatgatggtgaa

SEQ ID NO: 1055391 - DNA, 33 bp, Homo sapien
tgtgcagtgtcctgtacgtatattacacttcag

SEQ ID NO: 1055392 - DNA, 33 bp, Homo sapien
tgtgcagtgtcctgtatgtatattacacttcag

SEQ ID NO: 1055393 - DNA, 33 bp, Homo sapien
tgttctgggacacgtaaagttacattctcccct

SEQ ID NO: 1055394 - DNA, 33 bp, Homo sapien
tgttctgggacacgtagagttacattctcccct

SEQ ID NO: 1055395 - DNA, 33 bp, Homo sapien
ggccatgtgccattaactgaacactttccgtat

SEQ ID NO: 1055396 - DNA, 33 bp, Homo sapien
ggccatgtgccattaagtgaacactttccgtat

SEQ ID NO: 1055397 - DNA, 33 bp, Homo sapien
gggttgctgtaaattcactctccctttaaggtt

SEQ ID NO: 1055398 - DNA, 33 bp, Homo sapien
gggttgctgtaaattctctctccctttaaggtt

SEQ ID NO: 1055399 - DNA, 33 bp, Homo sapien
tgaaaagctttcaaggacattcataattcttca

SEQ ID NO: 1055400 - DNA, 33 bp, Homo sapien
tgaaaagctttcaagggcattcataattcttca

SEQ ID NO: 1055401 - DNA, 33 bp, Homo sapien
gttattatcactgctactaatgtgtataccaaa

SEQ ID NO: 1055402 - DNA, 33 bp, Homo sapien
gttattatcactgctattaatgtgtataccaaa

SEQ ID NO: 1055403 - DNA, 33 bp, Homo sapien
tataaccaggatcactcaataagaaaacaagta

SEQ ID NO: 1055404 - DNA, 33 bp, Homo sapien
tataaccaggatcacttaataagaaaacaagta

SEQ ID NO: 1055405 - DNA, 33 bp, Homo sapien
gatcttctgttaaaacaaggaaaggcagttacc

SEQ ID NO: 1055406 - DNA, 33 bp, Homo sapien
gatcttctgttaaaaccaggaaaggcagttacc

SEQ ID NO: 1055407 - DNA, 33 bp, Homo sapien
aagtgtacaacttgccaatttttttgtactttc

SEQ ID NO: 1055408 - DNA, 33 bp, Homo sapien
aagtgtacaacttgccgatttttttgtactttc

SEQ ID NO: 1055409 - DNA, 33 bp, Homo sapien
tcatatggtaactacaataatgtacagtgacaa

SEQ ID NO: 1055410 - DNA, 33 bp, Homo sapien
tcatatggtaactacactaatgtacagtgacaa

SEQ ID NO: 1055411 - DNA, 33 bp, Homo sapien
tagataaaagtcatagcaccttacgttgtaatt

SEQ ID NO: 1055412 - DNA, 33 bp, Homo sapien
tagataaaagtcatagtaccttacgttgtaatt

SEQ ID NO: 1055413 - DNA, 33 bp, Homo sapien
atgcctatgtgttgtcccttcgcagctataaag

SEQ ID NO: 1055414 - DNA, 33 bp, Homo sapien
atgcctatgtgttgtctcttcgcagctataaag

SEQ ID NO: 1055415 - DNA, 33 bp, Homo sapien
tttatgtaatggcaaccgggaacaaaaacagcc

SEQ ID NO: 1055416 - DNA, 33 bp, Homo sapien
tttatgtaatggcaactgggaacaaaaacagcc

SEQ ID NO: 1055417 - DNA, 33 bp, Homo sapien
acctagcaatcacctaccctgattttatagacg

SEQ ID NO: 1055418 - DNA, 33 bp, Homo sapien
acctagcaatcacctatcctgattttatagacg

SEQ ID NO: 1055419 - DNA, 33 bp, Homo sapien
aatgagaaagcagatagaaagtacctagtcact

SEQ ID NO: 1055420 - DNA, 33 bp, Homo sapien
aatgagaaagcagatataaagtacctagtcact

SEQ ID NO: 1055421 - DNA, 33 bp, Homo sapien
tctgactcctcaagtccaaacagttgtcaagcc

SEQ ID NO: 1055422 - DNA, 33 bp, Homo sapien
tctgactcctcaagtctaaacagttgtcaagcc

SEQ ID NO: 1055423 - DNA, 33 bp, Homo sapien
ttattaagggaaaaagacctgtgtgaagaacaa

SEQ ID NO: 1055424 - DNA, 33 bp, Homo sapien
ttattaagggaaaaaggcctgtgtgaagaacaa

SEQ ID NO: 1055425 - DNA, 33 bp, Homo sapien
tcgagtacctgtttcaagtgctatgtactgaga

SEQ ID NO: 1055426 - DNA, 33 bp, Homo sapien
tcgagtacctgtttcatgtgctatgtactgaga

SEQ ID NO: 1055427 - DNA, 33 bp, Homo sapien
acgggtggtatattgaacagccaaggagtgacc

SEQ ID NO: 1055428 - DNA, 33 bp, Homo sapien
acgggtggtatattgagcagccaaggagtgacc

SEQ ID NO: 1055429 - DNA, 33 bp, Homo sapien
aattacatagctctggaactatatatgccgaaa

SEQ ID NO: 1055430 - DNA, 33 bp, Homo sapien
aattacatagctctgggactatatatgccgaaa

SEQ ID NO: 1055431 - DNA, 33 bp, Homo sapien
ccctacagagactgaaaaagttaaatgcaactc

SEQ ID NO: 1055432 - DNA, 33 bp, Homo sapien
ccctacagagactgaagaagttaaatgcaactc

SEQ ID NO: 1055433 - DNA, 33 bp, Homo sapien
agatgataataccccccaggtcttagatacctg

SEQ ID NO: 1055434 - DNA, 33 bp, Homo sapien
agatgataatacccccgaggtcttagatacctg

SEQ ID NO: 1055435 - DNA, 33 bp, Homo sapien
tattgacagagtgagacatacacgtcgatattg

SEQ ID NO: 1055436 - DNA, 33 bp, Homo sapien
tattgacagagtgagatatacacgtcgatattg

SEQ ID NO: 1055437 - DNA, 33 bp, Homo sapien
actattgctgaaatgaatatgaacagaaattaa

SEQ ID NO: 1055438 - DNA, 33 bp, Homo sapien
actattgctgaaatgactatgaacagaaattaa

SEQ ID NO: 1055439 - DNA, 33 bp, Homo sapien
aagaacaagtgagaaaatgaatagaaaaaccct

SEQ ID NO: 1055440 - DNA, 33 bp, Homo sapien
aagaacaagtgagaaagtgaatagaaaaaccct

SEQ ID NO: 1055441 - DNA, 33 bp, Homo sapien
atctgtggtagatgaaagaacaagttgtataaa

SEQ ID NO: 1055442 - DNA, 33 bp, Homo sapien
atctgtggtagatgaatgaacaagttgtataaa

SEQ ID NO: 1055443 - DNA, 33 bp, Homo sapien
tatacttcaatgattacgtaagggtccaggcta

SEQ ID NO: 1055444 - DNA, 33 bp, Homo sapien
tatacttcaatgattatgtaagggtccaggcta

SEQ ID NO: 1055445 - DNA, 33 bp, Homo sapien
tgtgttccaagaactgacagtggctttcattca

SEQ ID NO: 1055446 - DNA, 33 bp, Homo sapien
tgtgttccaagaactggcagtggctttcattca

SEQ ID NO: 1055447 - DNA, 33 bp, Homo sapien
ctactgaaataatgaactggaccccaccaggaa

SEQ ID NO: 1055448 - DNA, 33 bp, Homo sapien
ctactgaaataatgaattggaccccaccaggaa

SEQ ID NO: 1055449 - DNA, 33 bp, Homo sapien
tgatttattacgtagacaatcagctcaacttct

SEQ ID NO: 1055450 - DNA, 33 bp, Homo sapien
tgatttattacgtagataatcagctcaacttct

SEQ ID NO: 1055451 - DNA, 33 bp, Homo sapien
gcagaataggatctccaacatgacttgatacaa

SEQ ID NO: 1055452 - DNA, 33 bp, Homo sapien
gcagaataggatctccgacatgacttgatacaa

SEQ ID NO: 1055453 - DNA, 33 bp, Homo sapien
ctgcacctttatattaggcatgcttttctactg

SEQ ID NO: 1055454 - DNA, 33 bp, Homo sapien
ctgcacctttatattatgcatgcttttctactg

SEQ ID NO: 1055455 - DNA, 33 bp, Homo sapien
actctttttacctccaacatatattcagacatg

SEQ ID NO: 1055456 - DNA, 33 bp, Homo sapien
actctttttacctccagcatatattcagacatg

SEQ ID NO: 1055457 - DNA, 33 bp, Homo sapien
gttgctgctttaagcacagggtggacaaatgta

SEQ ID NO: 1055458 - DNA, 33 bp, Homo sapien
gttgctgctttaagcagagggtggacaaatgta

SEQ ID NO: 1055459 - DNA, 33 bp, Homo sapien
aactttacaagtaacaactattccacatgatac

SEQ ID NO: 1055460 - DNA, 33 bp, Homo sapien
aactttacaagtaacacctattccacatgatac

SEQ ID NO: 1055461 - DNA, 33 bp, Homo sapien
tagctgttgattcttcccagatagattgagtgt

SEQ ID NO: 1055462 - DNA, 33 bp, Homo sapien
tagctgttgattcttctcagatagattgagtgt

SEQ ID NO: 1055463 - DNA, 33 bp, Homo sapien
cacaagcaactcctgacgattctaggaatttat

SEQ ID NO: 1055464 - DNA, 33 bp, Homo sapien
cacaagcaactcctgatgattctaggaatttat

SEQ ID NO: 1055465 - DNA, 33 bp, Homo sapien
ttgaacaattaagtacactttcagttgttatgc

SEQ ID NO: 1055466 - DNA, 33 bp, Homo sapien
ttgaacaattaagtacgctttcagttgttatgc

SEQ ID NO: 1055467 - DNA, 33 bp, Homo sapien
attacaggaatgaatcagaagcaaaaagttctt

SEQ ID NO: 1055468 - DNA, 33 bp, Homo sapien
attacaggaatgaatcggaagcaaaaagttctt

SEQ ID NO: 1055469 - DNA, 33 bp, Homo sapien
acttctggttccctcaagtttgatccattgaca

SEQ ID NO: 1055470 - DNA, 33 bp, Homo sapien
acttctggttccctcaggtttgatccattgaca

SEQ ID NO: 1055471 - DNA, 33 bp, Homo sapien
tatatcctatttgctgaatccacataattatca

SEQ ID NO: 1055472 - DNA, 33 bp, Homo sapien
tatatcctatttgctgcatccacataattatca

SEQ ID NO: 1055473 - DNA, 33 bp, Homo sapien
atctgaaattcagacccatatctaactaagttc

SEQ ID NO: 1055474 - DNA, 33 bp, Homo sapien
atctgaaattcagacctatatctaactaagttc

SEQ ID NO: 1055475 - DNA, 33 bp, Homo sapien
ttacctaaattctgaaccccaataaactcatgg

SEQ ID NO: 1055476 - DNA, 33 bp, Homo sapien
ttacctaaattctgaatcccaataaactcatgg

SEQ ID NO: 1055477 - DNA, 33 bp, Homo sapien
cccattcatcagcaaacctggtagtgctacctt

SEQ ID NO: 1055478 - DNA, 33 bp, Homo sapien
cccattcatcagcaaatctggtagtgctacctt

SEQ ID NO: 1055479 - DNA, 33 bp, Homo sapien
aataaagtgcaaaagacgtaatgctttcctgtg

SEQ ID NO: 1055480 - DNA, 33 bp, Homo sapien
aataaagtgcaaaagatgtaatgctttcctgtg

SEQ ID NO: 1055481 - DNA, 33 bp, Homo sapien
ctgttctgctaacataccctcaataaatcgatc

SEQ ID NO: 1055482 - DNA, 33 bp, Homo sapien
ctgttctgctaacatatcctcaataaatcgatc

SEQ ID NO: 1055483 - DNA, 33 bp, Homo sapien
tctcatcgcattcacaataagcacgtcaatacg

SEQ ID NO: 1055484 - DNA, 33 bp, Homo sapien
tctcatcgcattcacagtaagcacgtcaatacg

SEQ ID NO: 1055485 - DNA, 33 bp, Homo sapien
tgccctttgctttagacgttgtgccttaagacg

SEQ ID NO: 1055486 - DNA, 33 bp, Homo sapien
tgccctttgctttagatgttgtgccttaagacg

SEQ ID NO: 1055487 - DNA, 33 bp, Homo sapien
taactttcttcataacactgtcacttgctgaaa

SEQ ID NO: 1055488 - DNA, 33 bp, Homo sapien
taactttcttcataactctgtcacttgctgaaa

SEQ ID NO: 1055489 - DNA, 33 bp, Homo sapien
attgcttccagaatgacggtgcgcagttttgtt

SEQ ID NO: 1055490 - DNA, 33 bp, Homo sapien
attgcttccagaatgatggtgcgcagttttgtt

SEQ ID NO: 1055491 - DNA, 33 bp, Homo sapien
ttaaaacatgggctataatagaatgagatggaa

SEQ ID NO: 1055492 - DNA, 33 bp, Homo sapien
ttaaaacatgggctatgatagaatgagatggaa

SEQ ID NO: 1055493 - DNA, 33 bp, Homo sapien
aaactctgcaaatgcaagaaactatcagagtga

SEQ ID NO: 1055494 - DNA, 33 bp, Homo sapien
aaactctgcaaatgcaggaaactatcagagtga

SEQ ID NO: 1055495 - DNA, 33 bp, Homo sapien
ttacttgttccagtccaatgggagtacgttatc

SEQ ID NO: 1055496 - DNA, 33 bp, Homo sapien
ttacttgttccagtccgatgggagtacgttatc

SEQ ID NO: 1055497 - DNA, 33 bp, Homo sapien
ggcctagtaacaaaaagagaagttcaactaacc

SEQ ID NO: 1055498 - DNA, 33 bp, Homo sapien
ggcctagtaacaaaaatagaagttcaactaacc

SEQ ID NO: 1055499 - DNA, 33 bp, Homo sapien
taagtcctgttacagaagacaaagtaatgatca

SEQ ID NO: 1055500 - DNA, 33 bp, Homo sapien
taagtcctgttacagaggacaaagtaatgatca

SEQ ID NO: 1055501 - DNA, 33 bp, Homo sapien
gtttgaaaacgattgtcaaagaaagaggtatta

SEQ ID NO: 1055502 - DNA, 33 bp, Homo sapien
gtttgaaaacgattgttaaagaaagaggtatta

SEQ ID NO: 1055503 - DNA, 33 bp, Homo sapien
catattcttttttggaactgtttacatatcttt

SEQ ID NO: 1055504 - DNA, 33 bp, Homo sapien
catattcttttttggagctgtttacatatcttt

SEQ ID NO: 1055505 - DNA, 33 bp, Homo sapien
attcataataaaagtcacaccaagttattcttg

SEQ ID NO: 1055506 - DNA, 33 bp, Homo sapien
attcataataaaagtcgcaccaagttattcttg

SEQ ID NO: 1055507 - DNA, 33 bp, Homo sapien
aatataaatctagaaaggtctccacctccaaat

SEQ ID NO: 1055508 - DNA, 33 bp, Homo sapien
aatataaatctagaaatgtctccacctccaaat

SEQ ID NO: 1055509 - DNA, 33 bp, Homo sapien
agtctggcacttataaaccctaacttagcttct

SEQ ID NO: 1055510 - DNA, 33 bp, Homo sapien
agtctggcacttataagccctaacttagcttct

SEQ ID NO: 1055511 - DNA, 33 bp, Homo sapien
tttttctggacacgtaagatggaccttgcataa

SEQ ID NO: 1055512 - DNA, 33 bp, Homo sapien
tttttctggacacgtaggatggaccttgcataa

SEQ ID NO: 1055513 - DNA, 33 bp, Homo sapien
gttatatttccacttacgcttcattggccagat

SEQ ID NO: 1055514 - DNA, 33 bp, Homo sapien
gttatatttccacttatgcttcattggccagat

SEQ ID NO: 1055515 - DNA, 33 bp, Homo sapien
ggatgctgacaactcacgaaggattatcattgc

SEQ ID NO: 1055516 - DNA, 33 bp, Homo sapien
ggatgctgacaactcaggaaggattatcattgc

SEQ ID NO: 1055517 - DNA, 33 bp, Homo sapien
catatatttttcttgaaacttgcagaaatgatt

SEQ ID NO: 1055518 - DNA, 33 bp, Homo sapien
catatatttttcttgatacttgcagaaatgatt

SEQ ID NO: 1055519 - DNA, 33 bp, Homo sapien
agtacttgtgaaatcaagctgcccaggtcaggc

SEQ ID NO: 1055520 - DNA, 33 bp, Homo sapien
agtacttgtgaaatcaggctgcccaggtcaggc

SEQ ID NO: 1055521 - DNA, 33 bp, Homo sapien
cagacaagtggaataacggagttgccattaact

SEQ ID NO: 1055522 - DNA, 33 bp, Homo sapien
cagacaagtggaataatggagttgccattaact

SEQ ID NO: 1055523 - DNA, 33 bp, Homo sapien
actatagtgtagaaaactgcaggaggataaggt

SEQ ID NO: 1055524 - DNA, 33 bp, Homo sapien
actatagtgtagaaaattgcaggaggataaggt

SEQ ID NO: 1055525 - DNA, 33 bp, Homo sapien
ccttgatgtagccttaagcagaatcaaccatca

SEQ ID NO: 1055526 - DNA, 33 bp, Homo sapien
ccttgatgtagccttacgcagaatcaaccatca

SEQ ID NO: 1055527 - DNA, 33 bp, Homo sapien
tttattcagaattacacctgcccatttctccag

SEQ ID NO: 1055528 - DNA, 33 bp, Homo sapien
tttattcagaattacatctgcccatttctccag

SEQ ID NO: 1055529 - DNA, 33 bp, Homo sapien
ttagtaccagcgcttactaacactgccctgtct

SEQ ID NO: 1055530 - DNA, 33 bp, Homo sapien
ttagtaccagcgcttattaacactgccctgtct

SEQ ID NO: 1055531 - DNA, 33 bp, Homo sapien
tgttaaaagcatttcacaataagtgacacacac

SEQ ID NO: 1055532 - DNA, 33 bp, Homo sapien
tgttaaaagcatttcataataagtgacacacac

SEQ ID NO: 1055533 - DNA, 33 bp, Homo sapien
acactataggcagcaaaattcttgtaattgaaa

SEQ ID NO: 1055534 - DNA, 33 bp, Homo sapien
acactataggcagcaagattcttgtaattgaaa

SEQ ID NO: 1055535 - DNA, 33 bp, Homo sapien
tcgatcaggttaataaaagcttcttcattattt

SEQ ID NO: 1055536 - DNA, 33 bp, Homo sapien
tcgatcaggttaataagagcttcttcattattt

SEQ ID NO: 1055537 - DNA, 33 bp, Homo sapien
cattggtaagaatgaacagtatatggaatatag

SEQ ID NO: 1055538 - DNA, 33 bp, Homo sapien
cattggtaagaatgaatagtatatggaatatag

SEQ ID NO: 1055539 - DNA, 33 bp, Homo sapien
tcctctgctccacctacgttgacccctttgctg

SEQ ID NO: 1055540 - DNA, 33 bp, Homo sapien
tcctctgctccacctatgttgacccctttgctg

SEQ ID NO: 1055541 - DNA, 33 bp, Homo sapien
agttctaattaaaatacgatgccaaatataact

SEQ ID NO: 1055542 - DNA, 33 bp, Homo sapien
agttctaattaaaatatgatgccaaatataact

SEQ ID NO: 1055543 - DNA, 33 bp, Homo sapien
atttgatggtaacttaacacatgatttttatta

SEQ ID NO: 1055544 - DNA, 33 bp, Homo sapien
atttgatggtaacttagcacatgatttttatta

SEQ ID NO: 1055545 - DNA, 33 bp, Homo sapien
agctatgttattggcaagatagcaccagccatt

SEQ ID NO: 1055546 - DNA, 33 bp, Homo sapien
agctatgttattggcaggatagcaccagccatt

SEQ ID NO: 1055547 - DNA, 33 bp, Homo sapien
tgagaaacagcaataacaggaaagtggagaaag

SEQ ID NO: 1055548 - DNA, 33 bp, Homo sapien
tgagaaacagcaataataggaaagtggagaaag

SEQ ID NO: 1055549 - DNA, 33 bp, Homo sapien
ttccacgaatatgttacgtagctaaaaggtgaa

SEQ ID NO: 1055550 - DNA, 33 bp, Homo sapien
ttccacgaatatgttatgtagctaaaaggtgaa

SEQ ID NO: 1055551 - DNA, 33 bp, Homo sapien
ttttttaaattctcagaagctgtaatcatatca

SEQ ID NO: 1055552 - DNA, 33 bp, Homo sapien
ttttttaaattctcagcagctgtaatcatatca

SEQ ID NO: 1055553 - DNA, 33 bp, Homo sapien
taattaacattgaaaaggaccttactttcttat

SEQ ID NO: 1055554 - DNA, 33 bp, Homo sapien
taattaacattgaaaatgaccttactttcttat

SEQ ID NO: 1055555 - DNA, 33 bp, Homo sapien
taatcctctttgacaaatgatgttaacattcct

SEQ ID NO: 1055556 - DNA, 33 bp, Homo sapien
taatcctctttgacaactgatgttaacattcct

SEQ ID NO: 1055557 - DNA, 33 bp, Homo sapien
gcctattgaatgaaacaatgttaatggctaacg

SEQ ID NO: 1055558 - DNA, 33 bp, Homo sapien
gcctattgaatgaaacgatgttaatggctaacg

SEQ ID NO: 1055559 - DNA, 33 bp, Homo sapien
ggactaaaatcacataagaaaccacaaaagaga

SEQ ID NO: 1055560 - DNA, 33 bp, Homo sapien
ggactaaaatcacataggaaaccacaaaagaga

SEQ ID NO: 1055561 - DNA, 33 bp, Homo sapien
tatcagggtgaaatcacgttaacagtaaccagg

SEQ ID NO: 1055562 - DNA, 33 bp, Homo sapien
tatcagggtgaaatcatgttaacagtaaccagg

SEQ ID NO: 1055563 - DNA, 33 bp, Homo sapien
tcagtttcctttcacagtctccacaattgctat

SEQ ID NO: 1055564 - DNA, 33 bp, Homo sapien
tcagtttcctttcacattctccacaattgctat

SEQ ID NO: 1055565 - DNA, 33 bp, Homo sapien
tttctatttcacaataagcctgcgctaaagtgc

SEQ ID NO: 1055566 - DNA, 33 bp, Homo sapien
tttctatttcacaataggcctgcgctaaagtgc

SEQ ID NO: 1055567 - DNA, 33 bp, Homo sapien
ttggggatagaagattcaatctgaaggaaaatg

SEQ ID NO: 1055568 - DNA, 33 bp, Homo sapien
ttggggatagaagatttaatctgaaggaaaatg

SEQ ID NO: 1055569 - DNA, 33 bp, Homo sapien
aaacaggtgaagttccgattaaccatgacacca

SEQ ID NO: 1055570 - DNA, 33 bp, Homo sapien
aaacaggtgaagttcctattaaccatgacacca

SEQ ID NO: 1055571 - DNA, 33 bp, Homo sapien
ggttgaatgctctgcaaaaaacctttgtcttta

SEQ ID NO: 1055572 - DNA, 33 bp, Homo sapien
ggttgaatgctctgcagaaaacctttgtcttta

SEQ ID NO: 1055573 - DNA, 33 bp, Homo sapien
ggttttcctactcaagacgttccttttcaatct

SEQ ID NO: 1055574 - DNA, 33 bp, Homo sapien
ggttttcctactcaaggcgttccttttcaatct

SEQ ID NO: 1055575 - DNA, 33 bp, Homo sapien
atcttcatgggattatcacagtgttgcggactg

SEQ ID NO: 1055576 - DNA, 33 bp, Homo sapien
atcttcatgggattatgacagtgttgcggactg

SEQ ID NO: 1055577 - DNA, 33 bp, Homo sapien
tcactttaagaagcacgggtgtgaaatcctagc

SEQ ID NO: 1055578 - DNA, 33 bp, Homo sapien
tcactttaagaagcactggtgtgaaatcctagc

SEQ ID NO: 1055579 - DNA, 33 bp, Homo sapien
cgtttttgccttcaaaatttccaggatccaaca

SEQ ID NO: 1055580 - DNA, 33 bp, Homo sapien
cgtttttgccttcaaagtttccaggatccaaca

SEQ ID NO: 1055581 - DNA, 33 bp, Homo sapien
taaattctccacaaaactatccttgaatcccac

SEQ ID NO: 1055582 - DNA, 33 bp, Homo sapien
taaattctccacaaaattatccttgaatcccac

SEQ ID NO: 1055583 - DNA, 33 bp, Homo sapien
aagtgaaaaataagaactaagtgcatgggttta

SEQ ID NO: 1055584 - DNA, 33 bp, Homo sapien
aagtgaaaaataagaattaagtgcatgggttta

SEQ ID NO: 1055585 - DNA, 33 bp, Homo sapien
gttgcattgctccttcactccagaaactaggta

SEQ ID NO: 1055586 - DNA, 33 bp, Homo sapien
gttgcattgctccttcgctccagaaactaggta

SEQ ID NO: 1055587 - DNA, 33 bp, Homo sapien
gtgcccagcacttttacggcatataccaggtgt

SEQ ID NO: 1055588 - DNA, 33 bp, Homo sapien
gtgcccagcacttttatggcatataccaggtgt

SEQ ID NO: 1055589 - DNA, 33 bp, Homo sapien
aggacaaaaaaatctaaagacagcttatctgtt

SEQ ID NO: 1055590 - DNA, 33 bp, Homo sapien
aggacaaaaaaatctacagacagcttatctgtt

SEQ ID NO: 1055591 - DNA, 33 bp, Homo sapien
aatttgaggttgaagacctgatagccggttgac

SEQ ID NO: 1055592 - DNA, 33 bp, Homo sapien
aatttgaggttgaagatctgatagccggttgac

SEQ ID NO: 1055593 - DNA, 33 bp, Homo sapien
gcctgtttggtcaggacaagtaatgagaccata

SEQ ID NO: 1055594 - DNA, 33 bp, Homo sapien
gcctgtttggtcaggagaagtaatgagaccata

SEQ ID NO: 1055595 - DNA, 33 bp, Homo sapien
aacaagcttggatgcaatataactagatacata

SEQ ID NO: 1055596 - DNA, 33 bp, Homo sapien
aacaagcttggatgcagtataactagatacata

SEQ ID NO: 1055597 - DNA, 33 bp, Homo sapien
ccactgaacttttgaacgccaaatttgcaatta

SEQ ID NO: 1055598 - DNA, 33 bp, Homo sapien
ccactgaacttttgaatgccaaatttgcaatta

SEQ ID NO: 1055599 - DNA, 33 bp, Homo sapien
atatgccaaggtttaaagtttgatcttctccct

SEQ ID NO: 1055600 - DNA, 33 bp, Homo sapien
atatgccaaggtttaatgtttgatcttctccct

SEQ ID NO: 1055601 - DNA, 33 bp, Homo sapien
gaacccaattcttacacaattcaagctctgagc

SEQ ID NO: 1055602 - DNA, 33 bp, Homo sapien
gaacccaattcttacataattcaagctctgagc

SEQ ID NO: 1055603 - DNA, 33 bp, Homo sapien
catgtacagaatccaacgttgaatatggcattg

SEQ ID NO: 1055604 - DNA, 33 bp, Homo sapien
catgtacagaatccaatgttgaatatggcattg

SEQ ID NO: 1055605 - DNA, 33 bp, Homo sapien
tttttttttccaacacaatccattctccaaaca

SEQ ID NO: 1055606 - DNA, 33 bp, Homo sapien
tttttttttccaacacgatccattctccaaaca

SEQ ID NO: 1055607 - DNA, 33 bp, Homo sapien
aatacagaaattaacaaagcaagctgattcatg

SEQ ID NO: 1055608 - DNA, 33 bp, Homo sapien
aatacagaaattaacagagcaagctgattcatg

SEQ ID NO: 1055609 - DNA, 33 bp, Homo sapien
ccaagcactctactcacgatggtaatagaaaat

SEQ ID NO: 1055610 - DNA, 33 bp, Homo sapien
ccaagcactctactcatgatggtaatagaaaat

SEQ ID NO: 1055611 - DNA, 33 bp, Homo sapien
tttactgaagtctttcgagcaatgtctgacctc

SEQ ID NO: 1055612 - DNA, 33 bp, Homo sapien
tttactgaagtctttctagcaatgtctgacctc

SEQ ID NO: 1055613 - DNA, 33 bp, Homo sapien
gtcaagattcattttaacaattttcctgaattt

SEQ ID NO: 1055614 - DNA, 33 bp, Homo sapien
gtcaagattcattttagcaattttcctgaattt

SEQ ID NO: 1055615 - DNA, 33 bp, Homo sapien
catgatgtcttaagtaaaaattgctttgacata

SEQ ID NO: 1055616 - DNA, 33 bp, Homo sapien
catgatgtcttaagtacaaattgctttgacata

SEQ ID NO: 1055617 - DNA, 33 bp, Homo sapien
tggagatcctagagaacataaaacctgtgcttg

SEQ ID NO: 1055618 - DNA, 33 bp, Homo sapien
tggagatcctagagaagataaaacctgtgcttg

SEQ ID NO: 1055619 - DNA, 33 bp, Homo sapien
ctgtgaagcggcatttaaaaatatactcaacct

SEQ ID NO: 1055620 - DNA, 33 bp, Homo sapien
ctgtgaagcggcatttgaaaatatactcaacct

SEQ ID NO: 1055621 - DNA, 33 bp, Homo sapien
atccttgaatgtaggcacaaacatatacagcat

SEQ ID NO: 1055622 - DNA, 33 bp, Homo sapien
atccttgaatgtaggcgcaaacatatacagcat

SEQ ID NO: 1055623 - DNA, 33 bp, Homo sapien
acctacagacccattacgtagatattgagccca

SEQ ID NO: 1055624 - DNA, 33 bp, Homo sapien
acctacagacccattaggtagatattgagccca

SEQ ID NO: 1055625 - DNA, 33 bp, Homo sapien
taaataatgggtagaccattcagccttacacat

SEQ ID NO: 1055626 - DNA, 33 bp, Homo sapien
taaataatgggtagactattcagccttacacat

SEQ ID NO: 1055627 - DNA, 33 bp, Homo sapien
ctttatgaaagagggacgcagaaaacaacccat

SEQ ID NO: 1055628 - DNA, 33 bp, Homo sapien
ctttatgaaagagggaggcagaaaacaacccat

SEQ ID NO: 1055629 - DNA, 33 bp, Homo sapien
ggctcattacacataaaattcatttagcagaga

SEQ ID NO: 1055630 - DNA, 33 bp, Homo sapien
ggctcattacacataacattcatttagcagaga

SEQ ID NO: 1055631 - DNA, 33 bp, Homo sapien
agaggctttgctaaaacgttcaggaaaatcaga

SEQ ID NO: 1055632 - DNA, 33 bp, Homo sapien
agaggctttgctaaaaggttcaggaaaatcaga

SEQ ID NO: 1055633 - DNA, 33 bp, Homo sapien
tcagcttgtccctcagaaatgttactgcagatt

SEQ ID NO: 1055634 - DNA, 33 bp, Homo sapien
tcagcttgtccctcagcaatgttactgcagatt

SEQ ID NO: 1055635 - DNA, 33 bp, Homo sapien
aggataaatatgtaggaacagtaactataggat

SEQ ID NO: 1055636 - DNA, 33 bp, Homo sapien
aggataaatatgtaggcacagtaactataggat

SEQ ID NO: 1055637 - DNA, 33 bp, Homo sapien
tactattcactttgccaactaacccattgaaat

SEQ ID NO: 1055638 - DNA, 33 bp, Homo sapien
tactattcactttgcccactaacccattgaaat

SEQ ID NO: 1055639 - DNA, 33 bp, Homo sapien
aggactagatttaggaaatgaacaaaaagctca

SEQ ID NO: 1055640 - DNA, 33 bp, Homo sapien
aggactagatttaggatatgaacaaaaagctca

SEQ ID NO: 1055641 - DNA, 33 bp, Homo sapien
ggccaagattaggccaagtaacactgaacatca

SEQ ID NO: 1055642 - DNA, 33 bp, Homo sapien
ggccaagattaggccacgtaacactgaacatca

SEQ ID NO: 1055643 - DNA, 33 bp, Homo sapien
tgtgtaattaataggcaaaacattatcccatgt

SEQ ID NO: 1055644 - DNA, 33 bp, Homo sapien
tgtgtaattaataggccaaacattatcccatgt

SEQ ID NO: 1055645 - DNA, 33 bp, Homo sapien
gagtctatgtgcttgcagaagggagattgcagt

SEQ ID NO: 1055646 - DNA, 33 bp, Homo sapien
gagtctatgtgcttgcggaagggagattgcagt

SEQ ID NO: 1055647 - DNA, 33 bp, Homo sapien
tgggagttgaaaaatactaatatgcttcctatg

SEQ ID NO: 1055648 - DNA, 33 bp, Homo sapien
tgggagttgaaaaatagtaatatgcttcctatg

SEQ ID NO: 1055649 - DNA, 33 bp, Homo sapien
actgaattctatgagaaaatcgaaaatgtgtca

SEQ ID NO: 1055650 - DNA, 33 bp, Homo sapien
actgaattctatgagagaatcgaaaatgtgtca

SEQ ID NO: 1055651 - DNA, 33 bp, Homo sapien
caactatccgaggcaacattaaagttcaaatgc

SEQ ID NO: 1055652 - DNA, 33 bp, Homo sapien
caactatccgaggcaagattaaagttcaaatgc

SEQ ID NO: 1055653 - DNA, 33 bp, Homo sapien
ccgacttaaagtttcccgaatgcggccactggt

SEQ ID NO: 1055654 - DNA, 33 bp, Homo sapien
ccgacttaaagtttcctgaatgcggccactggt

SEQ ID NO: 1055655 - DNA, 33 bp, Homo sapien
taacagtaaactacaaaatttagtgcagtatta

SEQ ID NO: 1055656 - DNA, 33 bp, Homo sapien
taacagtaaactacaatatttagtgcagtatta

SEQ ID NO: 1055657 - DNA, 33 bp, Homo sapien
agagccactgagatacagagctgcagtgtgatg

SEQ ID NO: 1055658 - DNA, 33 bp, Homo sapien
agagccactgagatacggagctgcagtgtgatg

SEQ ID NO: 1055659 - DNA, 33 bp, Homo sapien
acaggctgaattatgacaagacaaggatgataa

SEQ ID NO: 1055660 - DNA, 33 bp, Homo sapien
acaggctgaattatgagaagacaaggatgataa

SEQ ID NO: 1055661 - DNA, 33 bp, Homo sapien
ccttaaggaatttacaaactgagtaagtagaga

SEQ ID NO: 1055662 - DNA, 33 bp, Homo sapien
ccttaaggaatttacacactgagtaagtagaga

SEQ ID NO: 1055663 - DNA, 33 bp, Homo sapien
tcattggcatcattacactttaaataagttacc

SEQ ID NO: 1055664 - DNA, 33 bp, Homo sapien
tcattggcatcattacgctttaaataagttacc

SEQ ID NO: 1055665 - DNA, 33 bp, Homo sapien
aaatagtagatgaagccgaagtcattttgaagg

SEQ ID NO: 1055666 - DNA, 33 bp, Homo sapien
aaatagtagatgaagctgaagtcattttgaagg

SEQ ID NO: 1055667 - DNA, 33 bp, Homo sapien
tgacctgcttaaacaccggaacacagattagct

SEQ ID NO: 1055668 - DNA, 33 bp, Homo sapien
tgacctgcttaaacactggaacacagattagct

SEQ ID NO: 1055669 - DNA, 33 bp, Homo sapien
tgtggatgttacaaaaatagagtcaatttttgc

SEQ ID NO: 1055670 - DNA, 33 bp, Homo sapien
tgtggatgttacaaaattagagtcaatttttgc

SEQ ID NO: 1055671 - DNA, 33 bp, Homo sapien
tgatagaaatcacttaagaagtcacctcgtctt

SEQ ID NO: 1055672 - DNA, 33 bp, Homo sapien
tgatagaaatcacttatgaagtcacctcgtctt

SEQ ID NO: 1055673 - DNA, 33 bp, Homo sapien
ttaatgccaatgcttcacgaactctttgaaaaa

SEQ ID NO: 1055674 - DNA, 33 bp, Homo sapien
ttaatgccaatgcttctcgaactctttgaaaaa

SEQ ID NO: 1055675 - DNA, 33 bp, Homo sapien
acacatttttccttggcaatcttatcctggccg

SEQ ID NO: 1055676 - DNA, 33 bp, Homo sapien
acacatttttccttggtaatcttatcctggccg

SEQ ID NO: 1055677 - DNA, 33 bp, Homo sapien
agtggttggagattgaaataaatttggaaactt

SEQ ID NO: 1055678 - DNA, 33 bp, Homo sapien
agtggttggagattgagataaatttggaaactt

SEQ ID NO: 1055679 - DNA, 33 bp, Homo sapien
tataaactttaagaacacaagagaacatgtgaa

SEQ ID NO: 1055680 - DNA, 33 bp, Homo sapien
tataaactttaagaacgcaagagaacatgtgaa

SEQ ID NO: 1055681 - DNA, 33 bp, Homo sapien
gaaaacatgggaatcactattaaacctcagaaa

SEQ ID NO: 1055682 - DNA, 33 bp, Homo sapien
gaaaacatgggaatcagtattaaacctcagaaa

SEQ ID NO: 1055683 - DNA, 33 bp, Homo sapien
ggaatccaatacaacaaatgagtcatttcatta

SEQ ID NO: 1055684 - DNA, 33 bp, Homo sapien
ggaatccaatacaacagatgagtcatttcatta

SEQ ID NO: 1055685 - DNA, 33 bp, Homo sapien
tcatatgaagttaggcaaaatttgatttacatt

SEQ ID NO: 1055686 - DNA, 33 bp, Homo sapien
tcatatgaagttaggcgaaatttgatttacatt

SEQ ID NO: 1055687 - DNA, 33 bp, Homo sapien
cctagcaagttgaccacatggttggtgttacat

SEQ ID NO: 1055688 - DNA, 33 bp, Homo sapien
cctagcaagttgaccatatggttggtgttacat

SEQ ID NO: 1055689 - DNA, 33 bp, Homo sapien
tcaaagcctttccttacggcctgagttttggtt

SEQ ID NO: 1055690 - DNA, 33 bp, Homo sapien
tcaaagcctttccttatggcctgagttttggtt

SEQ ID NO: 1055691 - DNA, 33 bp, Homo sapien
tcttaaaggaagatacagaagtgagcacacaat

SEQ ID NO: 1055692 - DNA, 33 bp, Homo sapien
tcttaaaggaagatacggaagtgagcacacaat

SEQ ID NO: 1055693 - DNA, 33 bp, Homo sapien
gtttagctaattcagtaacacgagatcacactt

SEQ ID NO: 1055694 - DNA, 33 bp, Homo sapien
gtttagctaattcagtgacacgagatcacactt

SEQ ID NO: 1055695 - DNA, 33 bp, Homo sapien
tatacgagtttctgtaccacttttgctatttca

SEQ ID NO: 1055696 - DNA, 33 bp, Homo sapien
tatacgagtttctgtatcacttttgctatttca

SEQ ID NO: 1055697 - DNA, 33 bp, Homo sapien
gaacagcaagtgctaaagccttaaactatgtaa

SEQ ID NO: 1055698 - DNA, 33 bp, Homo sapien
gaacagcaagtgctaaggccttaaactatgtaa

SEQ ID NO: 1055699 - DNA, 33 bp, Homo sapien
tccaaatcccccagtacataaaaatttgtatag

SEQ ID NO: 1055700 - DNA, 33 bp, Homo sapien
tccaaatcccccagtatataaaaatttgtatag

SEQ ID NO: 1055701 - DNA, 33 bp, Homo sapien
actagtcagatgccaacggtggtaaactggggt

SEQ ID NO: 1055702 - DNA, 33 bp, Homo sapien
actagtcagatgccaatggtggtaaactggggt

SEQ ID NO: 1055703 - DNA, 33 bp, Homo sapien
tcaaatacattttaacaacttcatcttgtatat

SEQ ID NO: 1055704 - DNA, 33 bp, Homo sapien
tcaaatacattttaacgacttcatcttgtatat

SEQ ID NO: 1055705 - DNA, 33 bp, Homo sapien
aatacacacactgtccacactgattatgtctag

SEQ ID NO: 1055706 - DNA, 33 bp, Homo sapien
aatacacacactgtccgcactgattatgtctag

SEQ ID NO: 1055707 - DNA, 33 bp, Homo sapien
gatatcctgtaaaactcaatcctgcataaagaa

SEQ ID NO: 1055708 - DNA, 33 bp, Homo sapien
gatatcctgtaaaacttaatcctgcataaagaa

SEQ ID NO: 1055709 - DNA, 33 bp, Homo sapien
tcccctcatgaggtaaatcccagctttttcatc

SEQ ID NO: 1055710 - DNA, 33 bp, Homo sapien
tcccctcatgaggtaattcccagctttttcatc

SEQ ID NO: 1055711 - DNA, 33 bp, Homo sapien
taaattagggatttccagataggtgatgaaaaa

SEQ ID NO: 1055712 - DNA, 33 bp, Homo sapien
taaattagggatttcctgataggtgatgaaaaa

SEQ ID NO: 1055713 - DNA, 33 bp, Homo sapien
attatttcaaacagacaacactggttgcataaa

SEQ ID NO: 1055714 - DNA, 33 bp, Homo sapien
attatttcaaacagacgacactggttgcataaa

SEQ ID NO: 1055715 - DNA, 33 bp, Homo sapien
cttcctatttacatgaaaatgggttgccttatt

SEQ ID NO: 1055716 - DNA, 33 bp, Homo sapien
cttcctatttacatgacaatgggttgccttatt

SEQ ID NO: 1055717 - DNA, 33 bp, Homo sapien
tttaagaaacagaatacgatcaacaccctagca

SEQ ID NO: 1055718 - DNA, 33 bp, Homo sapien
tttaagaaacagaatatgatcaacaccctagca

SEQ ID NO: 1055719 - DNA, 33 bp, Homo sapien
gagaataacggtaacagatgcaggaataaaaag

SEQ ID NO: 1055720 - DNA, 33 bp, Homo sapien
gagaataacggtaacatatgcaggaataaaaag

SEQ ID NO: 1055721 - DNA, 33 bp, Homo sapien
gaggagtatgaagtcacaaaccaattgagttca

SEQ ID NO: 1055722 - DNA, 33 bp, Homo sapien
gaggagtatgaagtcagaaaccaattgagttca

SEQ ID NO: 1055723 - DNA, 33 bp, Homo sapien
actgctaatcaattcaatctagcagtgtccatg

SEQ ID NO: 1055724 - DNA, 33 bp, Homo sapien
actgctaatcaattcagtctagcagtgtccatg

SEQ ID NO: 1055725 - DNA, 33 bp, Homo sapien
catatcatacgaatgtgaagagtgcaatagcaa

SEQ ID NO: 1055726 - DNA, 33 bp, Homo sapien
catatcatacgaatgttaagagtgcaatagcaa

SEQ ID NO: 1055727 - DNA, 33 bp, Homo sapien
gatggggtcaagactacatgagagagagcagtt

SEQ ID NO: 1055728 - DNA, 33 bp, Homo sapien
gatggggtcaagactatatgagagagagcagtt

SEQ ID NO: 1055729 - DNA, 33 bp, Homo sapien
cctgacataaatgtatcaaaatcacacaataat

SEQ ID NO: 1055730 - DNA, 33 bp, Homo sapien
cctgacataaatgtatgaaaatcacacaataat

SEQ ID NO: 1055731 - DNA, 33 bp, Homo sapien
ggctattgtgaacatacgtgagaacattaaaaa

SEQ ID NO: 1055732 - DNA, 33 bp, Homo sapien
ggctattgtgaacatatgtgagaacattaaaaa

SEQ ID NO: 1055733 - DNA, 33 bp, Homo sapien
ttcagcacaataggtcaaaccttcatttgaatg

SEQ ID NO: 1055734 - DNA, 33 bp, Homo sapien
ttcagcacaataggtcgaaccttcatttgaatg

SEQ ID NO: 1055735 - DNA, 33 bp, Homo sapien
agaagactatggcaaacagtgttggttgatgaa

SEQ ID NO: 1055736 - DNA, 33 bp, Homo sapien
agaagactatggcaaatagtgttggttgatgaa

SEQ ID NO: 1055737 - DNA, 33 bp, Homo sapien
aaaggcactgctaaaaaggctttaagaaaggct

SEQ ID NO: 1055738 - DNA, 33 bp, Homo sapien
aaaggcactgctaaaagggctttaagaaaggct

SEQ ID NO: 1055739 - DNA, 33 bp, Homo sapien
atccccagattctggacggtagttaatcctggg

SEQ ID NO: 1055740 - DNA, 33 bp, Homo sapien
atccccagattctggatggtagttaatcctggg

SEQ ID NO: 1055741 - DNA, 33 bp, Homo sapien
aaagcttttgctcggaaagagtctgtagggcca

SEQ ID NO: 1055742 - DNA, 33 bp, Homo sapien
aaagcttttgctcggacagagtctgtagggcca

SEQ ID NO: 1055743 - DNA, 33 bp, Homo sapien
ttggcttacaggttcaagggagaaaagtaaatt

SEQ ID NO: 1055744 - DNA, 33 bp, Homo sapien
ttggcttacaggttcaggggagaaaagtaaatt

SEQ ID NO: 1055745 - DNA, 33 bp, Homo sapien
tttattcagtaatatgccagtattcacatagca

SEQ ID NO: 1055746 - DNA, 33 bp, Homo sapien
tttattcagtaatatgtcagtattcacatagca

SEQ ID NO: 1055747 - DNA, 33 bp, Homo sapien
tagcatggtggctttaagatactcacacatttt

SEQ ID NO: 1055748 - DNA, 33 bp, Homo sapien
tagcatggtggctttacgatactcacacatttt

SEQ ID NO: 1055749 - DNA, 33 bp, Homo sapien
gttttcaagagccatcgataacatccttgaaac

SEQ ID NO: 1055750 - DNA, 33 bp, Homo sapien
gttttcaagagccatctataacatccttgaaac

SEQ ID NO: 1055751 - DNA, 33 bp, Homo sapien
aagtaaaacttgagagaaaataccgagcaaata

SEQ ID NO: 1055752 - DNA, 33 bp, Homo sapien
aagtaaaacttgagaggaaataccgagcaaata

SEQ ID NO: 1055753 - DNA, 33 bp, Homo sapien
attaactggaaatccaatgctagagagacattt

SEQ ID NO: 1055754 - DNA, 33 bp, Homo sapien
attaactggaaatccagtgctagagagacattt

SEQ ID NO: 1055755 - DNA, 33 bp, Homo sapien
agcttataaactgatacggaattcgttacatga

SEQ ID NO: 1055756 - DNA, 33 bp, Homo sapien
agcttataaactgatatggaattcgttacatga

SEQ ID NO: 1055757 - DNA, 33 bp, Homo sapien
attctactacatctaccattcatttcttcatca

SEQ ID NO: 1055758 - DNA, 33 bp, Homo sapien
attctactacatctacgattcatttcttcatca

SEQ ID NO: 1055759 - DNA, 33 bp, Homo sapien
ctttagataactctacggcaaactaagtttact

SEQ ID NO: 1055760 - DNA, 33 bp, Homo sapien
ctttagataactctactgcaaactaagtttact

SEQ ID NO: 1055761 - DNA, 33 bp, Homo sapien
atatgcttgataatagaatttctgtacttgaaa

SEQ ID NO: 1055762 - DNA, 33 bp, Homo sapien
atatgcttgataatagcatttctgtacttgaaa

SEQ ID NO: 1055763 - DNA, 33 bp, Homo sapien
gaccaatcttcctccagaaagtctatgaagatg

SEQ ID NO: 1055764 - DNA, 33 bp, Homo sapien
gaccaatcttcctccataaagtctatgaagatg

SEQ ID NO: 1055765 - DNA, 33 bp, Homo sapien
tataattgtcttcgaaaaaattatcagttcaac

SEQ ID NO: 1055766 - DNA, 33 bp, Homo sapien
tataattgtcttcgaataaattatcagttcaac

SEQ ID NO: 1055767 - DNA, 33 bp, Homo sapien
aaagacttagtacaaaataagtgccaatagaga

SEQ ID NO: 1055768 - DNA, 33 bp, Homo sapien
aaagacttagtacaaagtaagtgccaatagaga

SEQ ID NO: 1055769 - DNA, 33 bp, Homo sapien
aatcaatgtagaaaacaatttaagtggaaaata

SEQ ID NO: 1055770 - DNA, 33 bp, Homo sapien
aatcaatgtagaaaactatttaagtggaaaata

SEQ ID NO: 1055771 - DNA, 33 bp, Homo sapien
ggcataataaacctgacaaaagagaagtctttc

SEQ ID NO: 1055772 - DNA, 33 bp, Homo sapien
ggcataataaacctgagaaaagagaagtctttc

SEQ ID NO: 1055773 - DNA, 33 bp, Homo sapien
atttccaaagtttgtaaattgaagacattcgaa

SEQ ID NO: 1055774 - DNA, 33 bp, Homo sapien
atttccaaagtttgtatattgaagacattcgaa

SEQ ID NO: 1055775 - DNA, 33 bp, Homo sapien
atttttccatttaggaatagctatgctccctct

SEQ ID NO: 1055776 - DNA, 33 bp, Homo sapien
atttttccatttaggagtagctatgctccctct

SEQ ID NO: 1055777 - DNA, 33 bp, Homo sapien
tgccaagggcagttaaatgtcaaaatacaaatg

SEQ ID NO: 1055778 - DNA, 33 bp, Homo sapien
tgccaagggcagttaagtgtcaaaatacaaatg

SEQ ID NO: 1055779 - DNA, 33 bp, Homo sapien
agtgagatgtctaccaatgccgggctccggggc

SEQ ID NO: 1055780 - DNA, 33 bp, Homo sapien
agtgagatgtctaccattgccgggctccggggc

SEQ ID NO: 1055781 - DNA, 33 bp, Homo sapien
tcgaggcaggtggtttcaaacatccatcccaaa

SEQ ID NO: 1055782 - DNA, 33 bp, Homo sapien
tcgaggcaggtggtttgaaacatccatcccaaa

SEQ ID NO: 1055783 - DNA, 33 bp, Homo sapien
cttctatatctgtttacgccagaatcatggttc

SEQ ID NO: 1055784 - DNA, 33 bp, Homo sapien
cttctatatctgtttatgccagaatcatggttc

SEQ ID NO: 1055785 - DNA, 33 bp, Homo sapien
acacacagagatgtgacatccaatgtggtctgt

SEQ ID NO: 1055786 - DNA, 33 bp, Homo sapien
acacacagagatgtgatatccaatgtggtctgt

SEQ ID NO: 1055787 - DNA, 33 bp, Homo sapien
aaatattggcagatgaacttgttgaaggagatg

SEQ ID NO: 1055788 - DNA, 33 bp, Homo sapien
aaatattggcagatgaccttgttgaaggagatg

SEQ ID NO: 1055789 - DNA, 33 bp, Homo sapien
caagtgacccagtatacaaaaggattcagtaag

SEQ ID NO: 1055790 - DNA, 33 bp, Homo sapien
caagtgacccagtatataaaaggattcagtaag

SEQ ID NO: 1055791 - DNA, 33 bp, Homo sapien
aaatgttcgcagattccacttgtatcatgatgg

SEQ ID NO: 1055792 - DNA, 33 bp, Homo sapien
aaatgttcgcagattctacttgtatcatgatgg

SEQ ID NO: 1055793 - DNA, 33 bp, Homo sapien
aatatatcttgacagcaaatggtattttattcc

SEQ ID NO: 1055794 - DNA, 33 bp, Homo sapien
aatatatcttgacagcgaatggtattttattcc

SEQ ID NO: 1055795 - DNA, 33 bp, Homo sapien
ttacacaataataccaaattgaggatattagag

SEQ ID NO: 1055796 - DNA, 33 bp, Homo sapien
ttacacaataataccagattgaggatattagag

SEQ ID NO: 1055797 - DNA, 33 bp, Homo sapien
gtaaagccagaagctacctaatttacatcctat

SEQ ID NO: 1055798 - DNA, 33 bp, Homo sapien
gtaaagccagaagctatctaatttacatcctat

SEQ ID NO: 1055799 - DNA, 33 bp, Homo sapien
ccacaaaagctacttacgttccaaaatgctctg

SEQ ID NO: 1055800 - DNA, 33 bp, Homo sapien
ccacaaaagctacttatgttccaaaatgctctg

SEQ ID NO: 1055801 - DNA, 33 bp, Homo sapien
ttttcttcctcctgaacatctttgtactattta

SEQ ID NO: 1055802 - DNA, 33 bp, Homo sapien
ttttcttcctcctgaatatctttgtactattta

SEQ ID NO: 1055803 - DNA, 33 bp, Homo sapien
cacccaggacttcattcaatagattttccttat

SEQ ID NO: 1055804 - DNA, 33 bp, Homo sapien
cacccaggacttcatttaatagattttccttat

SEQ ID NO: 1055805 - DNA, 33 bp, Homo sapien
tgtaactgctcgtttaaaacttttgaccagtag

SEQ ID NO: 1055806 - DNA, 33 bp, Homo sapien
tgtaactgctcgtttacaacttttgaccagtag

SEQ ID NO: 1055807 - DNA, 33 bp, Homo sapien
gagaaatccaaagacaagatagaatcacccttt

SEQ ID NO: 1055808 - DNA, 33 bp, Homo sapien
gagaaatccaaagacaggatagaatcacccttt

SEQ ID NO: 1055809 - DNA, 33 bp, Homo sapien
tctcttcttctctgaaaaatgaatgcctttatg

SEQ ID NO: 1055810 - DNA, 33 bp, Homo sapien
tctcttcttctctgaacaatgaatgcctttatg

SEQ ID NO: 1055811 - DNA, 33 bp, Homo sapien
cgtgacgtatttcatacgcaacaaaatgctatt

SEQ ID NO: 1055812 - DNA, 33 bp, Homo sapien
cgtgacgtatttcatatgcaacaaaatgctatt

SEQ ID NO: 1055813 - DNA, 33 bp, Homo sapien
tgtttaatgaagcatacgttggaattcttaaaa

SEQ ID NO: 1055814 - DNA, 33 bp, Homo sapien
tgtttaatgaagcatatgttggaattcttaaaa

SEQ ID NO: 1055815 - DNA, 33 bp, Homo sapien
ttcatctgctacataaatcctctcaaagcttct

SEQ ID NO: 1055816 - DNA, 33 bp, Homo sapien
ttcatctgctacataattcctctcaaagcttct

SEQ ID NO: 1055817 - DNA, 33 bp, Homo sapien
ttgggagtttttgctacgagagaaaagtggtta

SEQ ID NO: 1055818 - DNA, 33 bp, Homo sapien
ttgggagtttttgctaggagagaaaagtggtta

SEQ ID NO: 1055819 - DNA, 33 bp, Homo sapien
aatagatatatgaccaacagtgttatatgcagt

SEQ ID NO: 1055820 - DNA, 33 bp, Homo sapien
aatagatatatgaccatcagtgttatatgcagt

SEQ ID NO: 1055821 - DNA, 33 bp, Homo sapien
caaaattatctggcaagaaatttgtggctttat

SEQ ID NO: 1055822 - DNA, 33 bp, Homo sapien
caaaattatctggcaataaatttgtggctttat

SEQ ID NO: 1055823 - DNA, 33 bp, Homo sapien
gttactgaaaagtaaccggactggagaatgtga

SEQ ID NO: 1055824 - DNA, 33 bp, Homo sapien
gttactgaaaagtaactggactggagaatgtga

SEQ ID NO: 1055825 - DNA, 33 bp, Homo sapien
tgtatctattttctcgaagatcttaaaattagc

SEQ ID NO: 1055826 - DNA, 33 bp, Homo sapien
tgtatctattttctcggagatcttaaaattagc

SEQ ID NO: 1055827 - DNA, 33 bp, Homo sapien
gacatgatttgacccactaatgtctcaattctt

SEQ ID NO: 1055828 - DNA, 33 bp, Homo sapien
gacatgatttgacccagtaatgtctcaattctt

SEQ ID NO: 1055829 - DNA, 33 bp, Homo sapien
aggtacgtgtaattaacgctagagaaggtcaga

SEQ ID NO: 1055830 - DNA, 33 bp, Homo sapien
aggtacgtgtaattaatgctagagaaggtcaga

SEQ ID NO: 1055831 - DNA, 33 bp, Homo sapien
ggaacctgaatttaaaagcatgttaatgaactc

SEQ ID NO: 1055832 - DNA, 33 bp, Homo sapien
ggaacctgaatttaaacgcatgttaatgaactc

SEQ ID NO: 1055833 - DNA, 33 bp, Homo sapien
tcagaggctggatccacagatatagcagaatgt

SEQ ID NO: 1055834 - DNA, 33 bp, Homo sapien
tcagaggctggatccatagatatagcagaatgt

SEQ ID NO: 1055835 - DNA, 33 bp, Homo sapien
accttttttctcaactgacaaagtacattttta

SEQ ID NO: 1055836 - DNA, 33 bp, Homo sapien
accttttttctcaacttacaaagtacattttta

SEQ ID NO: 1055837 - DNA, 33 bp, Homo sapien
cagcctgtcagcgatactacctgggtatggagt

SEQ ID NO: 1055838 - DNA, 33 bp, Homo sapien
cagcctgtcagcgatattacctgggtatggagt

SEQ ID NO: 1055839 - DNA, 33 bp, Homo sapien
cctaaatttcgccatacaaggcaacatattcat

SEQ ID NO: 1055840 - DNA, 33 bp, Homo sapien
cctaaatttcgccatataaggcaacatattcat

SEQ ID NO: 1055841 - DNA, 33 bp, Homo sapien
catccatttaccttcaagtgtacattgacagca

SEQ ID NO: 1055842 - DNA, 33 bp, Homo sapien
catccatttaccttcaggtgtacattgacagca

SEQ ID NO: 1055843 - DNA, 33 bp, Homo sapien
tcttgttttattcagaagtcacattttatattg

SEQ ID NO: 1055844 - DNA, 33 bp, Homo sapien
tcttgttttattcagatgtcacattttatattg

SEQ ID NO: 1055845 - DNA, 33 bp, Homo sapien
tacattttgacctatagatactaattgcaatat

SEQ ID NO: 1055846 - DNA, 33 bp, Homo sapien
tacattttgacctatatatactaattgcaatat

SEQ ID NO: 1055847 - DNA, 33 bp, Homo sapien
ttagaagagaaataagactatcagtgggattag

SEQ ID NO: 1055848 - DNA, 33 bp, Homo sapien
ttagaagagaaataaggctatcagtgggattag

SEQ ID NO: 1055849 - DNA, 33 bp, Homo sapien
tactctcttatctttcacgaattattagcactt

SEQ ID NO: 1055850 - DNA, 33 bp, Homo sapien
tactctcttatctttcgcgaattattagcactt

SEQ ID NO: 1055851 - DNA, 33 bp, Homo sapien
ttgggacaaagctagacgagttcagggctaaac

SEQ ID NO: 1055852 - DNA, 33 bp, Homo sapien
ttgggacaaagctagatgagttcagggctaaac

SEQ ID NO: 1055853 - DNA, 33 bp, Homo sapien
gttgatgggcataaaccgagtatagcaatttat

SEQ ID NO: 1055854 - DNA, 33 bp, Homo sapien
gttgatgggcataaactgagtatagcaatttat

SEQ ID NO: 1055855 - DNA, 33 bp, Homo sapien
gggaatgttggttttacgaaatagagttgtgtt

SEQ ID NO: 1055856 - DNA, 33 bp, Homo sapien
gggaatgttggttttatgaaatagagttgtgtt

SEQ ID NO: 1055857 - DNA, 33 bp, Homo sapien
ttctttcttgagccaaaatgtatgcagcttcca

SEQ ID NO: 1055858 - DNA, 33 bp, Homo sapien
ttctttcttgagccaacatgtatgcagcttcca

SEQ ID NO: 1055859 - DNA, 33 bp, Homo sapien
taagtcactgaatctacggtaattttttacagc

SEQ ID NO: 1055860 - DNA, 33 bp, Homo sapien
taagtcactgaatctatggtaattttttacagc

SEQ ID NO: 1055861 - DNA, 33 bp, Homo sapien
atactttctaaaataacgcataagttccctatc

SEQ ID NO: 1055862 - DNA, 33 bp, Homo sapien
atactttctaaaataatgcataagttccctatc

SEQ ID NO: 1055863 - DNA, 33 bp, Homo sapien
ccaccacagcttagaaagtgctgagtctcacct

SEQ ID NO: 1055864 - DNA, 33 bp, Homo sapien
ccaccacagcttagaatgtgctgagtctcacct

SEQ ID NO: 1055865 - DNA, 33 bp, Homo sapien
caaaaacctacagcaaccatttaatggacaaac

SEQ ID NO: 1055866 - DNA, 33 bp, Homo sapien
caaaaacctacagcaagcatttaatggacaaac

SEQ ID NO: 1055867 - DNA, 33 bp, Homo sapien
ctgtctctctatcatcactatttaatcacatgg

SEQ ID NO: 1055868 - DNA, 33 bp, Homo sapien
ctgtctctctatcatcgctatttaatcacatgg

SEQ ID NO: 1055869 - DNA, 33 bp, Homo sapien
cctaaagcagaattgacacagatgatacaattg

SEQ ID NO: 1055870 - DNA, 33 bp, Homo sapien
cctaaagcagaattgatacagatgatacaattg

SEQ ID NO: 1055871 - DNA, 33 bp, Homo sapien
attatacattgccatacagtttttacatgtact

SEQ ID NO: 1055872 - DNA, 33 bp, Homo sapien
attatacattgccatatagtttttacatgtact

SEQ ID NO: 1055873 - DNA, 33 bp, Homo sapien
agttcattttttgagaccttgttttccttcatg

SEQ ID NO: 1055874 - DNA, 33 bp, Homo sapien
agttcattttttgagatcttgttttccttcatg

SEQ ID NO: 1055875 - DNA, 33 bp, Homo sapien
agtaaaagttggattcaaacttgttctgactgc

SEQ ID NO: 1055876 - DNA, 33 bp, Homo sapien
agtaaaagttggattcgaacttgttctgactgc

SEQ ID NO: 1055877 - DNA, 33 bp, Homo sapien
catctttatttttgggaagacttagctatttca

SEQ ID NO: 1055878 - DNA, 33 bp, Homo sapien
catctttatttttggggagacttagctatttca

SEQ ID NO: 1055879 - DNA, 33 bp, Homo sapien
aacaagaaatgcaaaacggattccctatttaat

SEQ ID NO: 1055880 - DNA, 33 bp, Homo sapien
aacaagaaatgcaaaatggattccctatttaat

SEQ ID NO: 1055881 - DNA, 33 bp, Homo sapien
agaaaagcaagcataacactttgcctcacaaca

SEQ ID NO: 1055882 - DNA, 33 bp, Homo sapien
agaaaagcaagcataatactttgcctcacaaca

SEQ ID NO: 1055883 - DNA, 33 bp, Homo sapien
atgtctatagacagaaatccagcaatcagacag

SEQ ID NO: 1055884 - DNA, 33 bp, Homo sapien
atgtctatagacagaactccagcaatcagacag

SEQ ID NO: 1055885 - DNA, 33 bp, Homo sapien
tactcctttctccatcaaccttcatccatccac

SEQ ID NO: 1055886 - DNA, 33 bp, Homo sapien
tactcctttctccatcgaccttcatccatccac

SEQ ID NO: 1055887 - DNA, 33 bp, Homo sapien
atagtacctgccagaacatctcttagcttcctc

SEQ ID NO: 1055888 - DNA, 33 bp, Homo sapien
atagtacctgccagaatatctcttagcttcctc

SEQ ID NO: 1055889 - DNA, 33 bp, Homo sapien
cagtaagtccttacaacgtcattaataggctct

SEQ ID NO: 1055890 - DNA, 33 bp, Homo sapien
cagtaagtccttacaatgtcattaataggctct

SEQ ID NO: 1055891 - DNA, 33 bp, Homo sapien
aggagaaccttcattcactactactaatctaat

SEQ ID NO: 1055892 - DNA, 33 bp, Homo sapien
aggagaaccttcattcgctactactaatctaat

SEQ ID NO: 1055893 - DNA, 33 bp, Homo sapien
aatggcaaatgggcacaaggaatcttcatgtgg

SEQ ID NO: 1055894 - DNA, 33 bp, Homo sapien
aatggcaaatgggcacgaggaatcttcatgtgg

SEQ ID NO: 1055895 - DNA, 33 bp, Homo sapien
gacattgttcatagccaaagaaatcacatgaag

SEQ ID NO: 1055896 - DNA, 33 bp, Homo sapien
gacattgttcatagccgaagaaatcacatgaag

SEQ ID NO: 1055897 - DNA, 33 bp, Homo sapien
ggaactgtagtaaacaggactcttgctatattt

SEQ ID NO: 1055898 - DNA, 33 bp, Homo sapien
ggaactgtagtaaacatgactcttgctatattt

SEQ ID NO: 1055899 - DNA, 33 bp, Homo sapien; identical to SEQ ID NO: 1055897

SEQ ID NO: 1055900 - DNA, 33 bp, Homo sapien; identical to SEQ ID NO: 1055898

SEQ ID NO: 1055901 - DNA, 33 bp, Homo sapien
gaattgtttccaggaccgctgtagataccaaaa

SEQ ID NO: 1055902 - DNA, 33 bp, Homo sapien
gaattgtttccaggactgctgtagataccaaaa

SEQ ID NO: 1055903 - DNA, 33 bp, Homo sapien
aatttcacatttggaaactttcacatttgagtt

SEQ ID NO: 1055904 - DNA, 33 bp, Homo sapien
aatttcacatttggaagctttcacatttgagtt

SEQ ID NO: 1055905 - DNA, 33 bp, Homo sapien
atgaataggaaaaccaacatgagctataaaatc

SEQ ID NO: 1055906 - DNA, 33 bp, Homo sapien
atgaataggaaaaccagcatgagctataaaatc

SEQ ID NO: 1055907 - DNA, 33 bp, Homo sapien
atccatcacttttcatcagcagatgcagttttt

SEQ ID NO: 1055908 - DNA, 33 bp, Homo sapien
atccatcacttttcattagcagatgcagttttt

SEQ ID NO: 1055909 - DNA, 33 bp, Homo sapien
aaagctgggaataaaaactgaacagtgtctcag

SEQ ID NO: 1055910 - DNA, 33 bp, Homo sapien
aaagctgggaataaaatctgaacagtgtctcag

SEQ ID NO: 1055911 - DNA, 33 bp, Homo sapien
tctagttatagtctaacaaaaagagctgagagg

SEQ ID NO: 1055912 - DNA, 33 bp, Homo sapien
tctagttatagtctaagaaaaagagctgagagg

SEQ ID NO: 1055913 - DNA, 33 bp, Homo sapien
ttacaaatagggctaaaagtgtaacaaatcttt

SEQ ID NO: 1055914 - DNA, 33 bp, Homo sapien
ttacaaatagggctaagagtgtaacaaatcttt

SEQ ID NO: 1055915 - DNA, 33 bp, Homo sapien
aagtttggcagccttggaggttaacctgcattt

SEQ ID NO: 1055916 - DNA, 33 bp, Homo sapien
aagtttggcagccttgtaggttaacctgcattt

SEQ ID NO: 1055917 - DNA, 33 bp, Homo sapien
catgatctggcaaataccaccttgctccctctg

SEQ ID NO: 1055918 - DNA, 33 bp, Homo sapien
catgatctggcaaatatcaccttgctccctctg

SEQ ID NO: 1055919 - DNA, 33 bp, Homo sapien
agtatgcactctttacagtaaaacactttggac

SEQ ID NO: 1055920 - DNA, 33 bp, Homo sapien
agtatgcactctttacggtaaaacactttggac

SEQ ID NO: 1055921 - DNA, 33 bp, Homo sapien
aacattccatactagagtctactattgagagtc

SEQ ID NO: 1055922 - DNA, 33 bp, Homo sapien
aacattccatactagattctactattgagagtc

SEQ ID NO: 1055923 - DNA, 33 bp, Homo sapien
tataattagtcctttacgaaaaaacatatcaat

SEQ ID NO: 1055924 - DNA, 33 bp, Homo sapien
tataattagtcctttatgaaaaaacatatcaat

SEQ ID NO: 1055925 - DNA, 33 bp, Homo sapien
tatctctactttccagcatgtgaaattctgctg

SEQ ID NO: 1055926 - DNA, 33 bp, Homo sapien
tatctctactttccaggatgtgaaattctgctg

SEQ ID NO: 1055927 - DNA, 33 bp, Homo sapien
atacaacgcaaaaaggcattctgcatagcacat

SEQ ID NO: 1055928 - DNA, 33 bp, Homo sapien
atacaacgcaaaaaggtattctgcatagcacat

SEQ ID NO: 1055929 - DNA, 33 bp, Homo sapien
gcattttaccaacaataaagtaacatgttcttt

SEQ ID NO: 1055930 - DNA, 33 bp, Homo sapien
gcattttaccaacaatgaagtaacatgttcttt

SEQ ID NO: 1055931 - DNA, 33 bp, Homo sapien
tgttctttatccttgcaattaatcattatagta

SEQ ID NO: 1055932 - DNA, 33 bp, Homo sapien
tgttctttatccttgcgattaatcattatagta

SEQ ID NO: 1055933 - DNA, 33 bp, Homo sapien
ctattgaactatgccacgaaaagttgttatggt

SEQ ID NO: 1055934 - DNA, 33 bp, Homo sapien
ctattgaactatgccatgaaaagttgttatggt

SEQ ID NO: 1055935 - DNA, 33 bp, Homo sapien
cctagcagtatacatcacttgttaactaaagag

SEQ ID NO: 1055936 - DNA, 33 bp, Homo sapien
cctagcagtatacatcgcttgttaactaaagag

SEQ ID NO: 1055937 - DNA, 33 bp, Homo sapien
atggaccagcttcgtaacctaccttaaggggaa

SEQ ID NO: 1055938 - DNA, 33 bp, Homo sapien
atggaccagcttcgtaccctaccttaaggggaa

SEQ ID NO: 1055939 - DNA, 33 bp, Homo sapien
tttaaaaatgacctaaatgtcttgttcacagtg

SEQ ID NO: 1055940 - DNA, 33 bp, Homo sapien
tttaaaaatgacctaactgtcttgttcacagtg

SEQ ID NO: 1055941 - DNA, 33 bp, Homo sapien
tgaaattatgtaattccacttggatggtagtca

SEQ ID NO: 1055942 - DNA, 33 bp, Homo sapien
tgaaattatgtaattctacttggatggtagtca

SEQ ID NO: 1055943 - DNA, 33 bp, Homo sapien
aatgtagatggtatttcaaacatggatattaag

SEQ ID NO: 1055944 - DNA, 33 bp, Homo sapien
aatgtagatggtatttgaaacatggatattaag

SEQ ID NO: 1055945 - DNA, 33 bp, Homo sapien
ctataaaactgatcatcaccttaagcagttaaa

SEQ ID NO: 1055946 - DNA, 33 bp, Homo sapien
ctataaaactgatcattaccttaagcagttaaa

SEQ ID NO: 1055947 - DNA, 33 bp, Homo sapien
agttggagaactgatactacttgatttaaagtc

SEQ ID NO: 1055948 - DNA, 33 bp, Homo sapien
agttggagaactgatattacttgatttaaagtc

SEQ ID NO: 1055949 - DNA, 33 bp, Homo sapien
taataaatgggaacaacttgagacaaacatccc

SEQ ID NO: 1055950 - DNA, 33 bp, Homo sapien
taataaatgggaacaatttgagacaaacatccc

SEQ ID NO: 1055951 - DNA, 33 bp, Homo sapien
agaacacaacttagaaagtacctagagtattta

SEQ ID NO: 1055952 - DNA, 33 bp, Homo sapien
agaacacaacttagaaggtacctagagtattta

SEQ ID NO: 1055953 - DNA, 33 bp, Homo sapien
aggaaaatatttcttacgaagcattgcttagcc

SEQ ID NO: 1055954 - DNA, 33 bp, Homo sapien
aggaaaatatttcttatgaagcattgcttagcc

SEQ ID NO: 1055955 - DNA, 33 bp, Homo sapien
tggaactaaagtcctaaaaattctcgatagaaa

SEQ ID NO: 1055956 - DNA, 33 bp, Homo sapien
tggaactaaagtcctacaaattctcgatagaaa

SEQ ID NO: 1055957 - DNA, 33 bp, Homo sapien
atgcacacttattgcacatcgtaaaagctctca

SEQ ID NO: 1055958 - DNA, 33 bp, Homo sapien
atgcacacttattgcagatcgtaaaagctctca

SEQ ID NO: 1055959 - DNA, 33 bp, Homo sapien
tcaggccttttttctgaagttgacatgaggcaa

SEQ ID NO: 1055960 - DNA, 33 bp, Homo sapien
tcaggccttttttctggagttgacatgaggcaa

SEQ ID NO: 1055961 - DNA, 33 bp, Homo sapien
ttgttactagaggatacctttgctagttttcta

SEQ ID NO: 1055962 - DNA, 33 bp, Homo sapien
ttgttactagaggatatctttgctagttttcta

SEQ ID NO: 1055963 - DNA, 33 bp, Homo sapien
aatatgtgttctaaaactgtataaagttcctag

SEQ ID NO: 1055964 - DNA, 33 bp, Homo sapien
aatatgtgttctaaaattgtataaagttcctag

SEQ ID NO: 1055965 - DNA, 33 bp, Homo sapien
aataaaggaattcacaatagacatcaagaatta

SEQ ID NO: 1055966 - DNA, 33 bp, Homo sapien
aataaaggaattcacagtagacatcaagaatta

SEQ ID NO: 1055967 - DNA, 33 bp, Homo sapien
ataatattctaattacaggcacacattggaatt

SEQ ID NO: 1055968 - DNA, 33 bp, Homo sapien
ataatattctaattacgggcacacattggaatt

SEQ ID NO: 1055969 - DNA, 33 bp, Homo sapien
ctctgataaacttcaaagtgaaaatatctactt

SEQ ID NO: 1055970 - DNA, 33 bp, Homo sapien
ctctgataaacttcaacgtgaaaatatctactt

SEQ ID NO: 1055971 - DNA, 33 bp, Homo sapien
tattgtggttgaaaatcaaacatatagtccctt

SEQ ID NO: 1055972 - DNA, 33 bp, Homo sapien
tattgtggttgaaaatgaaacatatagtccctt

SEQ ID NO: 1055973 - DNA, 33 bp, Homo sapien
catcatggtaataaataattcaggcaggaatca

SEQ ID NO: 1055974 - DNA, 33 bp, Homo sapien
catcatggtaataaattattcaggcaggaatca

SEQ ID NO: 1055975 - DNA, 33 bp, Homo sapien
ggaagtaggttgcttacaaaaaaatgggcttgg

SEQ ID NO: 1055976 - DNA, 33 bp, Homo sapien
ggaagtaggttgcttataaaaaaatgggcttgg

SEQ ID NO: 1055977 - DNA, 33 bp, Homo sapien
tcatgttggaggctcaaatgaataaatctactg

SEQ ID NO: 1055978 - DNA, 33 bp, Homo sapien
tcatgttggaggctcagatgaataaatctactg

SEQ ID NO: 1055979 - DNA, 33 bp, Homo sapien
ttctcaagtttcttaacgtgatttttgttattt

SEQ ID NO: 1055980 - DNA, 33 bp, Homo sapien
ttctcaagtttcttaatgtgatttttgttattt

SEQ ID NO: 1055981 - DNA, 33 bp, Homo sapien
acacaaaacagaagacagatgaaagtgagacgg

SEQ ID NO: 1055982 - DNA, 33 bp, Homo sapien
acacaaaacagaagaccgatgaaagtgagacgg

SEQ ID NO: 1055983 - DNA, 33 bp, Homo sapien
tagagtgagaaataccacttaaggaaagtctac

SEQ ID NO: 1055984 - DNA, 33 bp, Homo sapien
tagagtgagaaataccgcttaaggaaagtctac

SEQ ID NO: 1055985 - DNA, 33 bp, Homo sapien
aggacatttttattaaccttgtgctctccctgt

SEQ ID NO: 1055986 - DNA, 33 bp, Homo sapien
aggacatttttattaatcttgtgctctccctgt

SEQ ID NO: 1055987 - DNA, 33 bp, Homo sapien
atctgtactataaggcaaacaaggtaataattt

SEQ ID NO: 1055988 - DNA, 33 bp, Homo sapien
atctgtactataaggccaacaaggtaataattt

SEQ ID NO: 1055989 - DNA, 33 bp, Homo sapien
gtaactacaaaaaacaagtagaggaagaagtat

SEQ ID NO: 1055990 - DNA, 33 bp, Homo sapien
gtaactacaaaaaacaggtagaggaagaagtat

SEQ ID NO: 1055991 - DNA, 33 bp, Homo sapien
tcatatcaacaaattagccttgcaaaatactta

SEQ ID NO: 1055992 - DNA, 33 bp, Homo sapien
tcatatcaacaaattatccttgcaaaatactta

SEQ ID NO: 1055993 - DNA, 33 bp, Homo sapien
ggatgatcctggtgaccatgtggaaaattgatt

SEQ ID NO: 1055994 - DNA, 33 bp, Homo sapien
ggatgatcctggtgactatgtggaaaattgatt

SEQ ID NO: 1055995 - DNA, 33 bp, Homo sapien
tgcttactccagtttaactccagtgcaatcaat

SEQ ID NO: 1055996 - DNA, 33 bp, Homo sapien
tgcttactccagtttacctccagtgcaatcaat

SEQ ID NO: 1055997 - DNA, 33 bp, Homo sapien
cattacctaggtgacaagatccatacctcaaac

SEQ ID NO: 1055998 - DNA, 33 bp, Homo sapien
cattacctaggtgacaggatccatacctcaaac

SEQ ID NO: 1055999 - DNA, 33 bp, Homo sapien
atagcttggtattatcacaagaaaagagtgctt

SEQ ID NO: 1056000 - DNA, 33 bp, Homo sapien
atagcttggtattatcgcaagaaaagagtgctt

SEQ ID NO: 1056001 - DNA, 33 bp, Homo sapien
tgtgcttcaacacttcacaaaacaaggatgttc

SEQ ID NO: 1056002 - DNA, 33 bp, Homo sapien
tgtgcttcaacacttcgcaaaacaaggatgttc

SEQ ID NO: 1056003 - DNA, 33 bp, Homo sapien
gaagatgaatctgatgcagatcctttgtggaga

SEQ ID NO: 1056004 - DNA, 33 bp, Homo sapien
gaagatgaatctgatgtagatcctttgtggaga

SEQ ID NO: 1056005 - DNA, 33 bp, Homo sapien
gaatgcaaactaagaccctgataggcatttaat

SEQ ID NO: 1056006 - DNA, 33 bp, Homo sapien
gaatgcaaactaagacgctgataggcatttaat

SEQ ID NO: 1056007 - DNA, 33 bp, Homo sapien
aaagtcaccatgaaaacagtttgtcactttttt

SEQ ID NO: 1056008 - DNA, 33 bp, Homo sapien
aaagtcaccatgaaaatagtttgtcactttttt

SEQ ID NO: 1056009 - DNA, 33 bp, Homo sapien
ttcctttgctgaattccagtgcccttgtgagga

SEQ ID NO: 1056010 - DNA, 33 bp, Homo sapien
ttcctttgctgaattcgagtgcccttgtgagga

SEQ ID NO: 1056011 - DNA, 33 bp, Homo sapien
tttttttctgacaagcactaagagacatctatc

SEQ ID NO: 1056012 - DNA, 33 bp, Homo sapien
tttttttctgacaagcgctaagagacatctatc

SEQ ID NO: 1056013 - DNA, 33 bp, Homo sapien
cttaatgctcctatcaacatcatactggaagtc

SEQ ID NO: 1056014 - DNA, 33 bp, Homo sapien
cttaatgctcctatcagcatcatactggaagtc

SEQ ID NO: 1056015 - DNA, 33 bp, Homo sapien
ctaactgccaatgtgacagtagaagaggtaggg

SEQ ID NO: 1056016 - DNA, 33 bp, Homo sapien
ctaactgccaatgtgatagtagaagaggtaggg

SEQ ID NO: 1056017 - DNA, 33 bp, Homo sapien
acagacagattgttacaattttaaccgcaattt

SEQ ID NO: 1056018 - DNA, 33 bp, Homo sapien
acagacagattgttactattttaaccgcaattt

SEQ ID NO: 1056019 - DNA, 33 bp, Homo sapien
agcttttcaaaatctaaacagttacattgttaa

SEQ ID NO: 1056020 - DNA, 33 bp, Homo sapien
agcttttcaaaatctagacagttacattgttaa

SEQ ID NO: 1056021 - DNA, 33 bp, Homo sapien
taatctggccaaaaaaagaaagatcatgatact

SEQ ID NO: 1056022 - DNA, 33 bp, Homo sapien
taatctggccaaaaaaggaaagatcatgatact

SEQ ID NO: 1056023 - DNA, 33 bp, Homo sapien
gtatttccttcaatgcaatagactggataaggg

SEQ ID NO: 1056024 - DNA, 33 bp, Homo sapien
gtatttccttcaatgcgatagactggataaggg

SEQ ID NO: 1056025 - DNA, 33 bp, Homo sapien
atgtttcatagaaaaactgcatgttgtagtggt

SEQ ID NO: 1056026 - DNA, 33 bp, Homo sapien
atgtttcatagaaaaattgcatgttgtagtggt

SEQ ID NO: 1056027 - DNA, 33 bp, Homo sapien
aatttgggaaagccggaatattaagccagcttt

SEQ ID NO: 1056028 - DNA, 33 bp, Homo sapien
aatttgggaaagccgggatattaagccagcttt

SEQ ID NO: 1056029 - DNA, 33 bp, Homo sapien
tgtaagggcactcgaaatacagttcctacctat

SEQ ID NO: 1056030 - DNA, 33 bp, Homo sapien
tgtaagggcactcgaagtacagttcctacctat

SEQ ID NO: 1056031 - DNA, 33 bp, Homo sapien
aatgtgtaagaaatgactacatgtcctcatgta

SEQ ID NO: 1056032 - DNA, 33 bp, Homo sapien
aatgtgtaagaaatgattacatgtcctcatgta

SEQ ID NO: 1056033 - DNA, 33 bp, Homo sapien
ttccattaaaatttgccatcggagtcccaaaat

SEQ ID NO: 1056034 - DNA, 33 bp, Homo sapien
ttccattaaaatttgcgatcggagtcccaaaat

SEQ ID NO: 1056035 - DNA, 33 bp, Homo sapien
ttctgactctctaaagcctacaagcaattatag

SEQ ID NO: 1056036 - DNA, 33 bp, Homo sapien
ttctgactctctaaagtctacaagcaattatag

SEQ ID NO: 1056037 - DNA, 33 bp, Homo sapien
gagcactggacattaaatagcatccatttatac

SEQ ID NO: 1056038 - DNA, 33 bp, Homo sapien
gagcactggacattaattagcatccatttatac

SEQ ID NO: 1056039 - DNA, 33 bp, Homo sapien
aagaaaatgccaaaaaacgtatcacattatgtt

SEQ ID NO: 1056040 - DNA, 33 bp, Homo sapien
aagaaaatgccaaaaatcgtatcacattatgtt

SEQ ID NO: 1056041 - DNA, 33 bp, Homo sapien
ggcggattggagtagagaagcaatattttgatg

SEQ ID NO: 1056042 - DNA, 33 bp, Homo sapien
ggcggattggagtagataagcaatattttgatg

SEQ ID NO: 1056043 - DNA, 33 bp, Homo sapien
taaaatactttatgccaaaaaggaatgctgtct

SEQ ID NO: 1056044 - DNA, 33 bp, Homo sapien
taaaatactttatgccgaaaaggaatgctgtct

SEQ ID NO: 1056045 - DNA, 33 bp, Homo sapien
caacattaacttcgtcacgttttctaatttggt

SEQ ID NO: 1056046 - DNA, 33 bp, Homo sapien
caacattaacttcgtctcgttttctaatttggt

SEQ ID NO: 1056047 - DNA, 33 bp, Homo sapien
ggtttcgtatggttcacatttagttttaaattg

SEQ ID NO: 1056048 - DNA, 33 bp, Homo sapien
ggtttcgtatggttcatatttagttttaaattg

SEQ ID NO: 1056049 - DNA, 33 bp, Homo sapien
tcagctgttggacctcaattgttggtgttttca

SEQ ID NO: 1056050 - DNA, 33 bp, Homo sapien
tcagctgttggacctccattgttggtgttttca

SEQ ID NO: 1056051 - DNA, 33 bp, Homo sapien
ctaagactggttcatcagagaattggcaataaa

SEQ ID NO: 1056052 - DNA, 33 bp, Homo sapien
ctaagactggttcatcggagaattggcaataaa

SEQ ID NO: 1056053 - DNA, 33 bp, Homo sapien
tcattgaacagagtgcagagaccaaatttgcag

SEQ ID NO: 1056054 - DNA, 33 bp, Homo sapien
tcattgaacagagtgcggagaccaaatttgcag

SEQ ID NO: 1056055 - DNA, 33 bp, Homo sapien
ttattcatcctctttgaaagtcagtgttcatgc

SEQ ID NO: 1056056 - DNA, 33 bp, Homo sapien
ttattcatcctctttggaagtcagtgttcatgc

SEQ ID NO: 1056057 - DNA, 33 bp, Homo sapien
atattcaaaacaacccaatgagctaggaactat

SEQ ID NO: 1056058 - DNA, 33 bp, Homo sapien
atattcaaaacaacccgatgagctaggaactat

SEQ ID NO: 1056059 - DNA, 33 bp, Homo sapien
tgagaagagatagaaactgcctgagatatgtca

SEQ ID NO: 1056060 - DNA, 33 bp, Homo sapien
tgagaagagatagaaagtgcctgagatatgtca

SEQ ID NO: 1056061 - DNA, 33 bp, Homo sapien
accaatacaacacttacggaaaacctcacttta

SEQ ID NO: 1056062 - DNA, 33 bp, Homo sapien
accaatacaacacttatggaaaacctcacttta

SEQ ID NO: 1056063 - DNA, 33 bp, Homo sapien
gttcagaaaaacagcactacaaaagtggcatta

SEQ ID NO: 1056064 - DNA, 33 bp, Homo sapien
gttcagaaaaacagcattacaaaagtggcatta

SEQ ID NO: 1056065 - DNA, 33 bp, Homo sapien
tgcagtaatattgggaaaatcagaatgacatta

SEQ ID NO: 1056066 - DNA, 33 bp, Homo sapien
tgcagtaatattgggagaatcagaatgacatta

SEQ ID NO: 1056067 - DNA, 33 bp, Homo sapien
ggctcagagaaccatacaagatagctgaaaagt

SEQ ID NO: 1056068 - DNA, 33 bp, Homo sapien
ggctcagagaaccatataagatagctgaaaagt

SEQ ID NO: 1056069 - DNA, 33 bp, Homo sapien
aactcacaagtctataaaggaaactgggtggtc

SEQ ID NO: 1056070 - DNA, 33 bp, Homo sapien
aactcacaagtctatagaggaaactgggtggtc

SEQ ID NO: 1056071 - DNA, 33 bp, Homo sapien
gaatcaaatctcagcacgtctttgggtgagaac

SEQ ID NO: 1056072 - DNA, 33 bp, Homo sapien
gaatcaaatctcagcaggtctttgggtgagaac

SEQ ID NO: 1056073 - DNA, 33 bp, Homo sapien
atctaagactatatcaaggttttgacatttatt

SEQ ID NO: 1056074 - DNA, 33 bp, Homo sapien
atctaagactatatcatggttttgacatttatt

SEQ ID NO: 1056075 - DNA, 33 bp, Homo sapien
tatctctttataataactgtttgctaatactat

SEQ ID NO: 1056076 - DNA, 33 bp, Homo sapien
tatctctttataataagtgtttgctaatactat

SEQ ID NO: 1056077 - DNA, 33 bp, Homo sapien
tagcaaggttatgaagaaaaaggattgcttgta

SEQ ID NO: 1056078 - DNA, 33 bp, Homo sapien
tagcaaggttatgaaggaaaaggattgcttgta

SEQ ID NO: 1056079 - DNA, 33 bp, Homo sapien
catgcatatttcaaagcatcgtgttgtacacca

SEQ ID NO: 1056080 - DNA, 33 bp, Homo sapien
catgcatatttcaaagtatcgtgttgtacacca

SEQ ID NO: 1056081 - DNA, 33 bp, Homo sapien
aagtcaagtatttaagaagagtcatcctcaaac

SEQ ID NO: 1056082 - DNA, 33 bp, Homo sapien
aagtcaagtatttaagtagagtcatcctcaaac

SEQ ID NO: 1056083 - DNA, 33 bp, Homo sapien
gaaggttaaagatgtacgagtcctatatcccac

SEQ ID NO: 1056084 - DNA, 33 bp, Homo sapien
gaaggttaaagatgtatgagtcctatatcccac

SEQ ID NO: 1056085 - DNA, 33 bp, Homo sapien
tctttatccgtttctgcagatagtaactcacag

SEQ ID NO: 1056086 - DNA, 33 bp, Homo sapien
tctttatccgtttctgtagatagtaactcacag

SEQ ID NO: 1056087 - DNA, 33 bp, Homo sapien
tcacttcctggctaagaatattggaagctgaaa

SEQ ID NO: 1056088 - DNA, 33 bp, Homo sapien
tcacttcctggctaagcatattggaagctgaaa

SEQ ID NO: 1056089 - DNA, 33 bp, Homo sapien
tcactgatataaagcccaggtcttcattgtaac

SEQ ID NO: 1056090 - DNA, 33 bp, Homo sapien
tcactgatataaagcctaggtcttcattgtaac

SEQ ID NO: 1056091 - DNA, 33 bp, Homo sapien
aaaggactggagagggaactcaagattccatta

SEQ ID NO: 1056092 - DNA, 33 bp, Homo sapien
aaaggactggagagggtactcaagattccatta

SEQ ID NO: 1056093 - DNA, 33 bp, Homo sapien
acttattttaaattataaagcaggcaaacacaa

SEQ ID NO: 1056094 - DNA, 33 bp, Homo sapien
acttattttaaattattaagcaggcaaacacaa

SEQ ID NO: 1056095 - DNA, 33 bp, Homo sapien
cactgaagaggaattgaatttggattttcgggt

SEQ ID NO: 1056096 - DNA, 33 bp, Homo sapien
cactgaagaggaattggatttggattttcgggt

SEQ ID NO: 1056097 - DNA, 33 bp, Homo sapien
gctggacccagtcagcaaacaagatccagacac

SEQ ID NO: 1056098 - DNA, 33 bp, Homo sapien
gctggacccagtcagcgaacaagatccagacac

SEQ ID NO: 1056099 - DNA, 33 bp, Homo sapien
gtatcattaaccattacattaatcattcatcag

SEQ ID NO: 1056100 - DNA, 33 bp, Homo sapien
gtatcattaaccattagattaatcattcatcag

SEQ ID NO: 1056101 - DNA, 33 bp, Homo sapien
aaattctgacattagcacctaatacattaatta

SEQ ID NO: 1056102 - DNA, 33 bp, Homo sapien
aaattctgacattagcgcctaatacattaatta

SEQ ID NO: 1056103 - DNA, 33 bp, Homo sapien
tgcctgaaccatcaaaccagtaagtaaaatgct

SEQ ID NO: 1056104 - DNA, 33 bp, Homo sapien
tgcctgaaccatcaaagcagtaagtaaaatgct

SEQ ID NO: 1056105 - DNA, 33 bp, Homo sapien
agcaagtcacatcttacatgatggcatggaaca

SEQ ID NO: 1056106 - DNA, 33 bp, Homo sapien
agcaagtcacatcttatatgatggcatggaaca

SEQ ID NO: 1056107 - DNA, 33 bp, Homo sapien
atgaatattttcttaactgttgaaggtgaaaga

SEQ ID NO: 1056108 - DNA, 33 bp, Homo sapien
atgaatattttcttaattgttgaaggtgaaaga

SEQ ID NO: 1056109 - DNA, 33 bp, Homo sapien
caggcagtagactagcaattaaaaacttagtca

SEQ ID NO: 1056110 - DNA, 33 bp, Homo sapien
caggcagtagactagcgattaaaaacttagtca

SEQ ID NO: 1056111 - DNA, 33 bp, Homo sapien
ttaccaaatgttgagcaaaaggaaacgtaatga

SEQ ID NO: 1056112 - DNA, 33 bp, Homo sapien
ttaccaaatgttgagcgaaaggaaacgtaatga

SEQ ID NO: 1056113 - DNA, 33 bp, Homo sapien
ccaagaagacatcatcaaagagacactaatttc

SEQ ID NO: 1056114 - DNA, 33 bp, Homo sapien
ccaagaagacatcatccaagagacactaatttc

SEQ ID NO: 1056115 - DNA, 33 bp, Homo sapien
ggaaatggaaaaatcaaatattggagcctgtgg

SEQ ID NO: 1056116 - DNA, 33 bp, Homo sapien
ggaaatggaaaaatcagatattggagcctgtgg

SEQ ID NO: 1056117 - DNA, 33 bp, Homo sapien
ctcacaccagacagaaggaccattattaaaaag

SEQ ID NO: 1056118 - DNA, 33 bp, Homo sapien
ctcacaccagacagaatgaccattattaaaaag

SEQ ID NO: 1056119 - DNA, 33 bp, Homo sapien
attaaagatttaataacagcaaactggaaagtg

SEQ ID NO: 1056120 - DNA, 33 bp, Homo sapien
attaaagatttaataagagcaaactggaaagtg

SEQ ID NO: 1056121 - DNA, 33 bp, Homo sapien
agtgctagaactagaaaggatactgcttttaaa

SEQ ID NO: 1056122 - DNA, 33 bp, Homo sapien
agtgctagaactagaagggatactgcttttaaa

SEQ ID NO: 1056123 - DNA, 33 bp, Homo sapien
acagaggaaacaactcacaaatgtataagcctg

SEQ ID NO: 1056124 - DNA, 33 bp, Homo sapien
acagaggaaacaactcgcaaatgtataagcctg

SEQ ID NO: 1056125 - DNA, 33 bp, Homo sapien
tgatataaattgtggaagcagcatgaattagag

SEQ ID NO: 1056126 - DNA, 33 bp, Homo sapien
tgatataaattgtggaggcagcatgaattagag

SEQ ID NO: 1056127 - DNA, 33 bp, Homo sapien
atttcttcttggtaccgagtttatagtcatgaa

SEQ ID NO: 1056128 - DNA, 33 bp, Homo sapien
atttcttcttggtacctagtttatagtcatgaa

SEQ ID NO: 1056129 - DNA, 33 bp, Homo sapien
acatcaatggagaaaaattaactgtctagaaat

SEQ ID NO: 1056130 - DNA, 33 bp, Homo sapien
acatcaatggagaaaagttaactgtctagaaat

SEQ ID NO: 1056131 - DNA, 33 bp, Homo sapien
attaagaagttttagggatttgctgtagaaaat

SEQ ID NO: 1056132 - DNA, 33 bp, Homo sapien
attaagaagttttaggtatttgctgtagaaaat

SEQ ID NO: 1056133 - DNA, 33 bp, Homo sapien
cagaacaatggggaagaacaaattcatagcaca

SEQ ID NO: 1056134 - DNA, 33 bp, Homo sapien
cagaacaatggggaaggacaaattcatagcaca

SEQ ID NO: 1056135 - DNA, 33 bp, Homo sapien
ttctgttagccatagaactcctcatccaaagag

SEQ ID NO: 1056136 - DNA, 33 bp, Homo sapien
ttctgttagccatagatctcctcatccaaagag

SEQ ID NO: 1056137 - DNA, 33 bp, Homo sapien
agttagttttggtgacacttttactttgctgaa

SEQ ID NO: 1056138 - DNA, 33 bp, Homo sapien
agttagttttggtgacgcttttactttgctgaa

SEQ ID NO: 1056139 - DNA, 33 bp, Homo sapien
tttatccatcctactacggttagacatacaggt

SEQ ID NO: 1056140 - DNA, 33 bp, Homo sapien
tttatccatcctactatggttagacatacaggt

SEQ ID NO: 1056141 - DNA, 33 bp, Homo sapien
taaactctttagacaacgcttctaaattacata

SEQ ID NO: 1056142 - DNA, 33 bp, Homo sapien
taaactctttagacaatgcttctaaattacata

SEQ ID NO: 1056143 - DNA, 33 bp, Homo sapien
tacacaaaaagaaatacgctgtagtcaactgta

SEQ ID NO: 1056144 - DNA, 33 bp, Homo sapien
tacacaaaaagaaatatgctgtagtcaactgta

SEQ ID NO: 1056145 - DNA, 33 bp, Homo sapien
tccaaggactctattaggcattcatgttaaatc

SEQ ID NO: 1056146 - DNA, 33 bp, Homo sapien
tccaaggactctattatgcattcatgttaaatc

SEQ ID NO: 1056147 - DNA, 33 bp, Homo sapien
tttaaatttaagtctacgtgaaatgaccactat

SEQ ID NO: 1056148 - DNA, 33 bp, Homo sapien
tttaaatttaagtctatgtgaaatgaccactat

SEQ ID NO: 1056149 - DNA, 33 bp, Homo sapien
taattttcttgtgctcaaagctattatttgaat

SEQ ID NO: 1056150 - DNA, 33 bp, Homo sapien
taattttcttgtgctcgaagctattatttgaat

SEQ ID NO: 1056151 - DNA, 33 bp, Homo sapien
atacgaccttgagaaaacggtacagtctggagt

SEQ ID NO: 1056152 - DNA, 33 bp, Homo sapien
atacgaccttgagaaagcggtacagtctggagt

SEQ ID NO: 1056153 - DNA, 33 bp, Homo sapien
tgactctcaaggctaacgtaaaaatggctgtca

SEQ ID NO: 1056154 - DNA, 33 bp, Homo sapien
tgactctcaaggctaatgtaaaaatggctgtca

SEQ ID NO: 1056155 - DNA, 33 bp, Homo sapien
ttctgtgagttgggaaatgttgtttaactcaat

SEQ ID NO: 1056156 - DNA, 33 bp, Homo sapien
ttctgtgagttgggaagtgttgtttaactcaat

SEQ ID NO: 1056157 - DNA, 33 bp, Homo sapien
actaaggctctaaaaacttgatatgacttgcag

SEQ ID NO: 1056158 - DNA, 33 bp, Homo sapien
actaaggctctaaaaatttgatatgacttgcag

SEQ ID NO: 1056159 - DNA, 33 bp, Homo sapien
tcctgagtgcacaaagcctccaagacattcctg

SEQ ID NO: 1056160 - DNA, 33 bp, Homo sapien
tcctgagtgcacaaaggctccaagacattcctg

SEQ ID NO: 1056161 - DNA, 33 bp, Homo sapien
tcctctgcagttgttacataggaaatttcctgt

SEQ ID NO: 1056162 - DNA, 33 bp, Homo sapien
tcctctgcagttgttatataggaaatttcctgt

SEQ ID NO: 1056163 - DNA, 33 bp, Homo sapien
tgacttaaactgcagagattggggaagaagtgg

SEQ ID NO: 1056164 - DNA, 33 bp, Homo sapien
tgacttaaactgcagatattggggaagaagtgg

SEQ ID NO: 1056165 - DNA, 33 bp, Homo sapien
tccagcatctagaacaacatcttaaatgtatag

SEQ ID NO: 1056166 - DNA, 33 bp, Homo sapien
tccagcatctagaacagcatcttaaatgtatag

SEQ ID NO: 1056167 - DNA, 33 bp, Homo sapien
tttagatgtattcaggaagtagccacatggttc

SEQ ID NO: 1056168 - DNA, 33 bp, Homo sapien
tttagatgtattcagggagtagccacatggttc

SEQ ID NO: 1056169 - DNA, 33 bp, Homo sapien
catatttactgcactacatattgtatctttatt

SEQ ID NO: 1056170 - DNA, 33 bp, Homo sapien
catatttactgcactatatattgtatctttatt

SEQ ID NO: 1056171 - DNA, 33 bp, Homo sapien
aagaaaaaattaaccaacttgccatcttagtag

SEQ ID NO: 1056172 - DNA, 33 bp, Homo sapien
aagaaaaaattaaccatcttgccatcttagtag

SEQ ID NO: 1056173 - DNA, 33 bp, Homo sapien
catatggagaaaacgtcaatgttgagtggaaag

SEQ ID NO: 1056174 - DNA, 33 bp, Homo sapien
catatggagaaaacgttaatgttgagtggaaag

SEQ ID NO: 1056175 - DNA, 33 bp, Homo sapien
aagtggtatcttttgaaaagtgaatatatccaa

SEQ ID NO: 1056176 - DNA, 33 bp, Homo sapien
aagtggtatcttttgacaagtgaatatatccaa

SEQ ID NO: 1056177 - DNA, 33 bp, Homo sapien
acttattttggcagtaacaatttagcttggttt

SEQ ID NO: 1056178 - DNA, 33 bp, Homo sapien
acttattttggcagtagcaatttagcttggttt

SEQ ID NO: 1056179 - DNA, 33 bp, Homo sapien
cgttactaacttttggccagaattgactatgga

SEQ ID NO: 1056180 - DNA, 33 bp, Homo sapien
cgttactaacttttggtcagaattgactatgga

SEQ ID NO: 1056181 - DNA, 33 bp, Homo sapien
ttcaataaggctgacaataaaagcatttctgta

SEQ ID NO: 1056182 - DNA, 33 bp, Homo sapien
ttcaataaggctgacagtaaaagcatttctgta

SEQ ID NO: 1056183 - DNA, 33 bp, Homo sapien
caccaaatttgaaatgacactttcatcaaacaa

SEQ ID NO: 1056184 - DNA, 33 bp, Homo sapien
caccaaatttgaaatgtcactttcatcaaacaa

SEQ ID NO: 1056185 - DNA, 33 bp, Homo sapien
ctctctcaggatattcacccttggaaccaaggc

SEQ ID NO: 1056186 - DNA, 33 bp, Homo sapien
ctctctcaggatattcgcccttggaaccaaggc

SEQ ID NO: 1056187 - DNA, 33 bp, Homo sapien
tagtacacttgagggtaacagtctaggatctat

SEQ ID NO: 1056188 - DNA, 33 bp, Homo sapien
tagtacacttgagggtcacagtctaggatctat

SEQ ID NO: 1056189 - DNA, 33 bp, Homo sapien
gacaagcagtatcttaacacctggagctgaaaa

SEQ ID NO: 1056190 - DNA, 33 bp, Homo sapien
gacaagcagtatcttatcacctggagctgaaaa

SEQ ID NO: 1056191 - DNA, 33 bp, Homo sapien
tagcacatacattgtaactcataagagaatctt

SEQ ID NO: 1056192 - DNA, 33 bp, Homo sapien
tagcacatacattgtacctcataagagaatctt

SEQ ID NO: 1056193 - DNA, 33 bp, Homo sapien
aggcacatggcgagagcaggttgcgcctttcct

SEQ ID NO: 1056194 - DNA, 33 bp, Homo sapien
aggcacatggcgagagtaggttgcgcctttcct

SEQ ID NO: 1056195 - DNA, 33 bp, Homo sapien
actggtacaaaagcagacatttagaccaatgga

SEQ ID NO: 1056196 - DNA, 33 bp, Homo sapien
actggtacaaaagcaggcatttagaccaatgga

SEQ ID NO: 1056197 - DNA, 33 bp, Homo sapien
accttttaaagtctgacgggagacagctaccat

SEQ ID NO: 1056198 - DNA, 33 bp, Homo sapien
accttttaaagtctgatgggagacagctaccat

SEQ ID NO: 1056199 - DNA, 33 bp, Homo sapien
tgtaaatggaaaattagagctttggcatttaac

SEQ ID NO: 1056200 - DNA, 33 bp, Homo sapien
tgtaaatggaaaattatagctttggcatttaac

SEQ ID NO: 1056201 - DNA, 33 bp, Homo sapien
ccggtgggatcgggatcaagctccagtaatcaa

SEQ ID NO: 1056202 - DNA, 33 bp, Homo sapien
ccggtgggatcgggattaagctccagtaatcaa

SEQ ID NO: 1056203 - DNA, 33 bp, Homo sapien
agacagtccatgatgaaatttagtcactatgat

SEQ ID NO: 1056204 - DNA, 33 bp, Homo sapien
agacagtccatgatgacatttagtcactatgat

SEQ ID NO: 1056205 - DNA, 33 bp, Homo sapien
atctatgcaatgattagaattttagaatgccaa

SEQ ID NO: 1056206 - DNA, 33 bp, Homo sapien
atctatgcaatgattataattttagaatgccaa

SEQ ID NO: 1056207 - DNA, 33 bp, Homo sapien
cgtaggaggatacgccaagcagataactgaaaa

SEQ ID NO: 1056208 - DNA, 33 bp, Homo sapien
cgtaggaggatacgccgagcagataactgaaaa

SEQ ID NO: 1056209 - DNA, 33 bp, Homo sapien
acacagagactagcagaagttgtttatggaaga

SEQ ID NO: 1056210 - DNA, 33 bp, Homo sapien
acacagagactagcaggagttgtttatggaaga

SEQ ID NO: 1056211 - DNA, 33 bp, Homo sapien
ctgtagctacttttacaggaaagcccaagcatc

SEQ ID NO: 1056212 - DNA, 33 bp, Homo sapien
ctgtagctacttttacgggaaagcccaagcatc

SEQ ID NO: 1056213 - DNA, 33 bp, Homo sapien
cttgacttggactaacacttccaatgtgagggt

SEQ ID NO: 1056214 - DNA, 33 bp, Homo sapien
cttgacttggactaacgcttccaatgtgagggt

SEQ ID NO: 1056215 - DNA, 33 bp, Homo sapien
catgcaattattgaccaagaagcttcctgaatt

SEQ ID NO: 1056216 - DNA, 33 bp, Homo sapien
catgcaattattgaccgagaagcttcctgaatt

SEQ ID NO: 1056217 - DNA, 33 bp, Homo sapien
gacattttcatgaataccaagagtgttgagata

SEQ ID NO: 1056218 - DNA, 33 bp, Homo sapien
gacattttcatgaatatcaagagtgttgagata

SEQ ID NO: 1056219 - DNA, 33 bp, Homo sapien
gtttgggaaataaatgaaccaatgtacacaggg

SEQ ID NO: 1056220 - DNA, 33 bp, Homo sapien
gtttgggaaataaatggaccaatgtacacaggg

SEQ ID NO: 1056221 - DNA, 33 bp, Homo sapien
gtagcaaatatggagaactcatgtcgagatatg

SEQ ID NO: 1056222 - DNA, 33 bp, Homo sapien
gtagcaaatatggagagctcatgtcgagatatg

SEQ ID NO: 1056223 - DNA, 33 bp, Homo sapien
taaagtgttacagtaacctgtgtttttctgtgt

SEQ ID NO: 1056224 - DNA, 33 bp, Homo sapien
taaagtgttacagtaatctgtgtttttctgtgt

SEQ ID NO: 1056225 - DNA, 33 bp, Homo sapien
agctcaagatcataaagtactcatcaggctggg

SEQ ID NO: 1056226 - DNA, 33 bp, Homo sapien
agctcaagatcataaattactcatcaggctggg

SEQ ID NO: 1056227 - DNA, 33 bp, Homo sapien
aaagcaagtgttgtagcaacagatgttgaataa

SEQ ID NO: 1056228 - DNA, 33 bp, Homo sapien
aaagcaagtgttgtagtaacagatgttgaataa

SEQ ID NO: 1056229 - DNA, 33 bp, Homo sapien
gtattttatattactaaagtggacatatgtctg

SEQ ID NO: 1056230 - DNA, 33 bp, Homo sapien
gtattttatattactacagtggacatatgtctg

SEQ ID NO: 1056231 - DNA, 33 bp, Homo sapien
tagtagtagccataaaattaagttcatagtctt

SEQ ID NO: 1056232 - DNA, 33 bp, Homo sapien
tagtagtagccataaagttaagttcatagtctt

SEQ ID NO: 1056233 - DNA, 33 bp, Homo sapien
accttccctttggatcgccagctgaaccaaagt

SEQ ID NO: 1056234 - DNA, 33 bp, Homo sapien
accttccctttggatctccagctgaaccaaagt

SEQ ID NO: 1056235 - DNA, 33 bp, Homo sapien
caaaatgaaagaaaaaatgttgagggcagccaa

SEQ ID NO: 1056236 - DNA, 33 bp, Homo sapien
caaaatgaaagaaaaagtgttgagggcagccaa

SEQ ID NO: 1056237 - DNA, 33 bp, Homo sapien
cccttattactgaatcacttcctagagaccata

SEQ ID NO: 1056238 - DNA, 33 bp, Homo sapien
cccttattactgaatcgcttcctagagaccata

SEQ ID NO: 1056239 - DNA, 33 bp, Homo sapien
tcaaaggcaaacagaagatttggaaagctttgt

SEQ ID NO: 1056240 - DNA, 33 bp, Homo sapien
tcaaaggcaaacagaatatttggaaagctttgt

SEQ ID NO: 1056241 - DNA, 33 bp, Homo sapien
tacaaacctcaattccaaagcaaattgttgaca

SEQ ID NO: 1056242 - DNA, 33 bp, Homo sapien
tacaaacctcaattccgaagcaaattgttgaca

SEQ ID NO: 1056243 - DNA, 33 bp, Homo sapien
gattaaattcttttgacaactagtcattatgga

SEQ ID NO: 1056244 - DNA, 33 bp, Homo sapien
gattaaattcttttgagaactagtcattatgga

SEQ ID NO: 1056245 - DNA, 33 bp, Homo sapien
aatggctaaaactggacgggagacttggagaca

SEQ ID NO: 1056246 - DNA, 33 bp, Homo sapien
aatggctaaaactggatgggagacttggagaca

SEQ ID NO: 1056247 - DNA, 33 bp, Homo sapien
ttttgcttataatttaccactttcttgattatc

SEQ ID NO: 1056248 - DNA, 33 bp, Homo sapien
ttttgcttataatttatcactttcttgattatc

SEQ ID NO: 1056249 - DNA, 33 bp, Homo sapien
aagccttatgttctctcaaacctttacctaaac

SEQ ID NO: 1056250 - DNA, 33 bp, Homo sapien
aagccttatgttctctgaaacctttacctaaac

SEQ ID NO: 1056251 - DNA, 33 bp, Homo sapien
gaaaatggggaaattcactttcaaatatatttt

SEQ ID NO: 1056252 - DNA, 33 bp, Homo sapien
gaaaatggggaaattcgctttcaaatatatttt

SEQ ID NO: 1056253 - DNA, 33 bp, Homo sapien
ataaaatctgtcattgcagtgctatgtaatgag

SEQ ID NO: 1056254 - DNA, 33 bp, Homo sapien
ataaaatctgtcattgtagtgctatgtaatgag

SEQ ID NO: 1056255 - DNA, 33 bp, Homo sapien
cccattcctagctaataactcactagaaatggg

SEQ ID NO: 1056256 - DNA, 33 bp, Homo sapien
cccattcctagctaatgactcactagaaatggg

SEQ ID NO: 1056257 - DNA, 33 bp, Homo sapien
aaagtctggcaacataagattatagaatagttc

SEQ ID NO: 1056258 - DNA, 33 bp, Homo sapien
aaagtctggcaacataggattatagaatagttc

SEQ ID NO: 1056259 - DNA, 33 bp, Homo sapien
gtctagttttctgagaacaatcatactgttttc

SEQ ID NO: 1056260 - DNA, 33 bp, Homo sapien
gtctagttttctgagatcaatcatactgttttc

SEQ ID NO: 1056261 - DNA, 33 bp, Homo sapien
cagatcacccgaaagaatacagaaataagactg

SEQ ID NO: 1056262 - DNA, 33 bp, Homo sapien
cagatcacccgaaagagtacagaaataagactg

SEQ ID NO: 1056263 - DNA, 33 bp, Homo sapien
gtccttttttctgtaacatgaactttctccaca

SEQ ID NO: 1056264 - DNA, 33 bp, Homo sapien
gtccttttttctgtaatatgaactttctccaca

SEQ ID NO: 1056265 - DNA, 33 bp, Homo sapien
tgcatacctgtcagagaactgttgcaaatggac

SEQ ID NO: 1056266 - DNA, 33 bp, Homo sapien
tgcatacctgtcagagtactgttgcaaatggac

SEQ ID NO: 1056267 - DNA, 33 bp, Homo sapien
agactcgcctgtggataaacaagcttatacaat

SEQ ID NO: 1056268 - DNA, 33 bp, Homo sapien
agactcgcctgtggatgaacaagcttatacaat

SEQ ID NO: 1056269 - DNA, 33 bp, Homo sapien
cagttaacctctattaactttctgtctatctgg

SEQ ID NO: 1056270 - DNA, 33 bp, Homo sapien
cagttaacctctattagctttctgtctatctgg

SEQ ID NO: 1056271 - DNA, 33 bp, Homo sapien
atggacagcaggcctcaagtaccagatccttct

SEQ ID NO: 1056272 - DNA, 33 bp, Homo sapien
atggacagcaggcctcgagtaccagatccttct

SEQ ID NO: 1056273 - DNA, 33 bp, Homo sapien
ggcaattctaccataaagcagagtttatttata

SEQ ID NO: 1056274 - DNA, 33 bp, Homo sapien
ggcaattctaccataaggcagagtttatttata

SEQ ID NO: 1056275 - DNA, 33 bp, Homo sapien
gactgtcacaagaacaaatttgcaatttaggat

SEQ ID NO: 1056276 - DNA, 33 bp, Homo sapien
gactgtcacaagaacagatttgcaatttaggat

SEQ ID NO: 1056277 - DNA, 33 bp, Homo sapien
agattgtgcagctctagcctaactctattgaat

SEQ ID NO: 1056278 - DNA, 33 bp, Homo sapien
agattgtgcagctctatcctaactctattgaat

SEQ ID NO: 1056279 - DNA, 33 bp, Homo sapien
ggggaggagtattcagaaaatttttcacagaga

SEQ ID NO: 1056280 - DNA, 33 bp, Homo sapien
ggggaggagtattcaggaaatttttcacagaga

SEQ ID NO: 1056281 - DNA, 33 bp, Homo sapien
catatagttaagaggacagaatcatgtacttta

SEQ ID NO: 1056282 - DNA, 33 bp, Homo sapien
catatagttaagaggatagaatcatgtacttta

SEQ ID NO: 1056283 - DNA, 33 bp, Homo sapien
aaggtaaagtgaataaattacttgtcagaggtc

SEQ ID NO: 1056284 - DNA, 33 bp, Homo sapien
aaggtaaagtgaataagttacttgtcagaggtc

SEQ ID NO: 1056285 - DNA, 33 bp, Homo sapien
tggagattctgtagtacgctgtttgtgacatat

SEQ ID NO: 1056286 - DNA, 33 bp, Homo sapien
tggagattctgtagtatgctgtttgtgacatat

SEQ ID NO: 1056287 - DNA, 33 bp, Homo sapien
ctttattaacggtatcaacactttccaactcac

SEQ ID NO: 1056288 - DNA, 33 bp, Homo sapien
ctttattaacggtatcgacactttccaactcac

SEQ ID NO: 1056289 - DNA, 33 bp, Homo sapien
tgtttttagtaggacgcagtcagtttggatttt

SEQ ID NO: 1056290 - DNA, 33 bp, Homo sapien
tgtttttagtaggacggagtcagtttggatttt

SEQ ID NO: 1056291 - DNA, 33 bp, Homo sapien
atttcaccagtcttaggactttatcaaccatac

SEQ ID NO: 1056292 - DNA, 33 bp, Homo sapien
atttcaccagtcttagtactttatcaaccatac

SEQ ID NO: 1056293 - DNA, 33 bp, Homo sapien
tctttgagtggcatggaagatcctggtgtgtaa

SEQ ID NO: 1056294 - DNA, 33 bp, Homo sapien
tctttgagtggcatggcagatcctggtgtgtaa

SEQ ID NO: 1056295 - DNA, 33 bp, Homo sapien
tatcagattgacacatgagaagtttgttagtga

SEQ ID NO: 1056296 - DNA, 33 bp, Homo sapien
tatcagattgacacattagaagtttgttagtga

SEQ ID NO: 1056297 - DNA, 33 bp, Homo sapien
ggcctgtcacatggtaaatggaggtacaattcg

SEQ ID NO: 1056298 - DNA, 33 bp, Homo sapien
ggcctgtcacatggtatatggaggtacaattcg

SEQ ID NO: 1056299 - DNA, 33 bp, Homo sapien
tactgttgcttgcaaacaagagtcttaacagtg

SEQ ID NO: 1056300 - DNA, 33 bp, Homo sapien
tactgttgcttgcaaataagagtcttaacagtg

SEQ ID NO: 1056301 - DNA, 33 bp, Homo sapien
ttctttccaggttttacacaggctcaatgaata

SEQ ID NO: 1056302 - DNA, 33 bp, Homo sapien
ttctttccaggttttatacaggctcaatgaata

SEQ ID NO: 1056303 - DNA, 33 bp, Homo sapien
ggaaagtgtagagtagaaaaatcccaagtttcc

SEQ ID NO: 1056304 - DNA, 33 bp, Homo sapien
ggaaagtgtagagtaggaaaatcccaagtttcc

SEQ ID NO: 1056305 - DNA, 33 bp, Homo sapien
tagggatacagctatccaggaacgtgaaagatc

SEQ ID NO: 1056306 - DNA, 33 bp, Homo sapien
tagggatacagctatctaggaacgtgaaagatc

SEQ ID NO: 1056307 - DNA, 33 bp, Homo sapien
gcaaaaagaagtataactgcagtagaccccttt

SEQ ID NO: 1056308 - DNA, 33 bp, Homo sapien
gcaaaaagaagtataattgcagtagaccccttt

SEQ ID NO: 1056309 - DNA, 33 bp, Homo sapien
gactagaattaaaagaaaatggaagatatgcac

SEQ ID NO: 1056310 - DNA, 33 bp, Homo sapien
gactagaattaaaagagaatggaagatatgcac

SEQ ID NO: 1056311 - DNA, 33 bp, Homo sapien
aggtgtaattgacatacgttaaatcgctcatat

SEQ ID NO: 1056312 - DNA, 33 bp, Homo sapien
aggtgtaattgacatatgttaaatcgctcatat

SEQ ID NO: 1056313 - DNA, 33 bp, Homo sapien
gtcaacatgctattatgaggtctctagaactta

SEQ ID NO: 1056314 - DNA, 33 bp, Homo sapien
gtcaacatgctattattaggtctctagaactta

SEQ ID NO: 1056315 - DNA, 33 bp, Homo sapien
tttgtagttacgattaataaaagagccatgtgt

SEQ ID NO: 1056316 - DNA, 33 bp, Homo sapien
tttgtagttacgattagtaaaagagccatgtgt

SEQ ID NO: 1056317 - DNA, 33 bp, Homo sapien
gcccaaaacaattgcaacgtgtattcgtctgtt

SEQ ID NO: 1056318 - DNA, 33 bp, Homo sapien
gcccaaaacaattgcagcgtgtattcgtctgtt

SEQ ID NO: 1056319 - DNA, 33 bp, Homo sapien
tgaaagttcttttttaactgaagagattgggta

SEQ ID NO: 1056320 - DNA, 33 bp, Homo sapien
tgaaagttcttttttagctgaagagattgggta

SEQ ID NO: 1056321 - DNA, 33 bp, Homo sapien
gtctcgtgtcactgccaagtctagttccctcca

SEQ ID NO: 1056322 - DNA, 33 bp, Homo sapien
gtctcgtgtcactgccgagtctagttccctcca

SEQ ID NO: 1056323 - DNA, 33 bp, Homo sapien
gcattaaactcagtgacgtactgttacagtagc

SEQ ID NO: 1056324 - DNA, 33 bp, Homo sapien
gcattaaactcagtgatgtactgttacagtagc

SEQ ID NO: 1056325 - DNA, 33 bp, Homo sapien
tcctgtctcttccttacgtcaggtgtattaggt

SEQ ID NO: 1056326 - DNA, 33 bp, Homo sapien
tcctgtctcttccttatgtcaggtgtattaggt

SEQ ID NO: 1056327 - DNA, 33 bp, Homo sapien
cacttattggtactagaagattttgcagattat

SEQ ID NO: 1056328 - DNA, 33 bp, Homo sapien
cacttattggtactaggagattttgcagattat

SEQ ID NO: 1056329 - DNA, 33 bp, Homo sapien
cttcctctttttttcagtatttcaccactgagt

SEQ ID NO: 1056330 - DNA, 33 bp, Homo sapien
cttcctctttttttcattatttcaccactgagt

SEQ ID NO: 1056331 - DNA, 33 bp, Homo sapien
cccacctcactcctgccagtagctaggtctaca

SEQ ID NO: 1056332 - DNA, 33 bp, Homo sapien
cccacctcactcctgcgagtagctaggtctaca

SEQ ID NO: 1056333 - DNA, 33 bp, Homo sapien
atttaaatatcttccagtctttgcaaattgggt

SEQ ID NO: 1056334 - DNA, 33 bp, Homo sapien
atttaaatatcttccattctttgcaaattgggt

SEQ ID NO: 1056335 - DNA, 33 bp, Homo sapien
cttttcttcgaacctcacattcctctttgcaaa

SEQ ID NO: 1056336 - DNA, 33 bp, Homo sapien
cttttcttcgaacctcgcattcctctttgcaaa

SEQ ID NO: 1056337 - DNA, 33 bp, Homo sapien
caaacagactagctgaagagcccttcctaattg

SEQ ID NO: 1056338 - DNA, 33 bp, Homo sapien
caaacagactagctgaggagcccttcctaattg

SEQ ID NO: 1056339 - DNA, 33 bp, Homo sapien
acagcttttccttgaacattgttatctactgta

SEQ ID NO: 1056340 - DNA, 33 bp, Homo sapien
acagcttttccttgaagattgttatctactgta

SEQ ID NO: 1056341 - DNA, 33 bp, Homo sapien
gacagattgaccggagcagaacctggctttttc

SEQ ID NO: 1056342 - DNA, 33 bp, Homo sapien
gacagattgaccggagtagaacctggctttttc

SEQ ID NO: 1056343 - DNA, 33 bp, Homo sapien
atcttgcctacctctacggaataacatggccta

SEQ ID NO: 1056344 - DNA, 33 bp, Homo sapien
atcttgcctacctctatggaataacatggccta

SEQ ID NO: 1056345 - DNA, 33 bp, Homo sapien
atatctgttcctgcacaacttgagtacctgata

SEQ ID NO: 1056346 - DNA, 33 bp, Homo sapien
atatctgttcctgcacgacttgagtacctgata

SEQ ID NO: 1056347 - DNA, 33 bp, Homo sapien
catagcgaatctataaatattgcaattgttttc

SEQ ID NO: 1056348 - DNA, 33 bp, Homo sapien
catagcgaatctataactattgcaattgttttc

SEQ ID NO: 1056349 - DNA, 33 bp, Homo sapien
aatgttgaatcttctagctaccaacatataata

SEQ ID NO: 1056350 - DNA, 33 bp, Homo sapien
aatgttgaatcttctatctaccaacatataata

SEQ ID NO: 1056351 - DNA, 33 bp, Homo sapien
ttttcctcataaattcgaatcctctgttaataa

SEQ ID NO: 1056352 - DNA, 33 bp, Homo sapien
ttttcctcataaattctaatcctctgttaataa

SEQ ID NO: 1056353 - DNA, 33 bp, Homo sapien
gcagtttagtagcaaaagttttgttaattttgt

SEQ ID NO: 1056354 - DNA, 33 bp, Homo sapien
gcagtttagtagcaaaggttttgttaattttgt

SEQ ID NO: 1056355 - DNA, 33 bp, Homo sapien
ctcaactctgagacaacccatcttgaggtctga

SEQ ID NO: 1056356 - DNA, 33 bp, Homo sapien
ctcaactctgagacaagccatcttgaggtctga

SEQ ID NO: 1056357 - DNA, 33 bp, Homo sapien
tatgttcagtgacataaggataagagcagaaca

SEQ ID NO: 1056358 - DNA, 33 bp, Homo sapien
tatgttcagtgacatacggataagagcagaaca

SEQ ID NO: 1056359 - DNA, 33 bp, Homo sapien
ggctaaaggtctgataacttttaaatctcttac

SEQ ID NO: 1056360 - DNA, 33 bp, Homo sapien
ggctaaaggtctgatagcttttaaatctcttac

SEQ ID NO: 1056361 - DNA, 33 bp, Homo sapien
aagttgtaactgctgacctaatttgagaattcc

SEQ ID NO: 1056362 - DNA, 33 bp, Homo sapien
aagttgtaactgctgatctaatttgagaattcc

SEQ ID NO: 1056363 - DNA, 33 bp, Homo sapien
ttttgtgaggaaggaacttaggtaagacaaatg

SEQ ID NO: 1056364 - DNA, 33 bp, Homo sapien
ttttgtgaggaaggaatttaggtaagacaaatg

SEQ ID NO: 1056365 - DNA, 33 bp, Homo sapien
gtgggaaatcagaattcaatcctagaatgccac

SEQ ID NO: 1056366 - DNA, 33 bp, Homo sapien
gtgggaaatcagaatttaatcctagaatgccac

SEQ ID NO: 1056367 - DNA, 33 bp, Homo sapien
gataagcacaagaagaaaaaccattcatcctgc

SEQ ID NO: 1056368 - DNA, 33 bp, Homo sapien
gataagcacaagaagagaaaccattcatcctgc

SEQ ID NO: 1056369 - DNA, 33 bp, Homo sapien
tctatagttaaatgccaacttaattataattga

SEQ ID NO: 1056370 - DNA, 33 bp, Homo sapien
tctatagttaaatgccgacttaattataattga

SEQ ID NO: 1056371 - DNA, 33 bp, Homo sapien
ctacaatggtatccacaggatattttatgttaa

SEQ ID NO: 1056372 - DNA, 33 bp, Homo sapien
ctacaatggtatccaccggatattttatgttaa

SEQ ID NO: 1056373 - DNA, 33 bp, Homo sapien
tatagtgatacaaagtaaagaagcacagtattc

SEQ ID NO: 1056374 - DNA, 33 bp, Homo sapien
tatagtgatacaaagtgaagaagcacagtattc

SEQ ID NO: 1056375 - DNA, 33 bp, Homo sapien
aaaactgaagtaaagaacatggacctaaaagaa

SEQ ID NO: 1056376 - DNA, 33 bp, Homo sapien
aaaactgaagtaaagatcatggacctaaaagaa

SEQ ID NO: 1056377 - DNA, 33 bp, Homo sapien
aaaattaacggcataaatgagttgtccaatgat

SEQ ID NO: 1056378 - DNA, 33 bp, Homo sapien
aaaattaacggcataagtgagttgtccaatgat

SEQ ID NO: 1056379 - DNA, 33 bp, Homo sapien
ttcctttgccaactgaaattgaatcattctcaa

SEQ ID NO: 1056380 - DNA, 33 bp, Homo sapien
ttcctttgccaactgacattgaatcattctcaa

SEQ ID NO: 1056381 - DNA, 33 bp, Homo sapien
gaggaaattctaatgaagtgtagagtttctgaa

SEQ ID NO: 1056382 - DNA, 33 bp, Homo sapien
gaggaaattctaatgacgtgtagagtttctgaa

SEQ ID NO: 1056383 - DNA, 33 bp, Homo sapien
agacgtttgctagatgccaggaaaaatataaag

SEQ ID NO: 1056384 - DNA, 33 bp, Homo sapien
agacgtttgctagatgtcaggaaaaatataaag

SEQ ID NO: 1056385 - DNA, 33 bp, Homo sapien
aagaggcaagaataaacaggactttgtcttgaa

SEQ ID NO: 1056386 - DNA, 33 bp, Homo sapien
aagaggcaagaataaataggactttgtcttgaa

SEQ ID NO: 1056387 - DNA, 33 bp, Homo sapien
gattctaactaggtcaacgggcaaagaatactg

SEQ ID NO: 1056388 - DNA, 33 bp, Homo sapien
gattctaactaggtcagcgggcaaagaatactg

SEQ ID NO: 1056389 - DNA, 33 bp, Homo sapien
taatggatttttacaaacttgtaggaacacatg

SEQ ID NO: 1056390 - DNA, 33 bp, Homo sapien
taatggatttttacaagcttgtaggaacacatg

SEQ ID NO: 1056391 - DNA, 33 bp, Homo sapien
acatccaatgtggaacagttatgagttttattc

SEQ ID NO: 1056392 - DNA, 33 bp, Homo sapien
acatccaatgtggaacggttatgagttttattc

SEQ ID NO: 1056393 - DNA, 33 bp, Homo sapien
ttcatttcatatgaaaactctctgtaagtaaaa

SEQ ID NO: 1056394 - DNA, 33 bp, Homo sapien
ttcatttcatatgaaagctctctgtaagtaaaa

SEQ ID NO: 1056395 - DNA, 33 bp, Homo sapien
atgagattttttgagacattttaagctcatcaa

SEQ ID NO: 1056396 - DNA, 33 bp, Homo sapien
atgagattttttgagatattttaagctcatcaa

SEQ ID NO: 1056397 - DNA, 33 bp, Homo sapien
tttattaaccatagccaccattctgtacaatag

SEQ ID NO: 1056398 - DNA, 33 bp, Homo sapien
tttattaaccatagccgccattctgtacaatag

SEQ ID NO: 1056399 - DNA, 33 bp, Homo sapien
ttccaatggtgggagaatcaaataccattgaaa

SEQ ID NO: 1056400 - DNA, 33 bp, Homo sapien
ttccaatggtgggagagtcaaataccattgaaa

SEQ ID NO: 1056401 - DNA, 33 bp, Homo sapien
ccagtgtatacccaacaaattcatagccctcaa

SEQ ID NO: 1056402 - DNA, 33 bp, Homo sapien
ccagtgtatacccaaccaattcatagccctcaa

SEQ ID NO: 1056403 - DNA, 33 bp, Homo sapien
tgtaaatctagaataaccgttatgaaaggttta

SEQ ID NO: 1056404 - DNA, 33 bp, Homo sapien
tgtaaatctagaataatcgttatgaaaggttta

SEQ ID NO: 1056405 - DNA, 33 bp, Homo sapien
gagagggatctctttgcagctgtgtgctctgca

SEQ ID NO: 1056406 - DNA, 33 bp, Homo sapien
gagagggatctctttggagctgtgtgctctgca

SEQ ID NO: 1056407 - DNA, 33 bp, Homo sapien
acagtgaagttgacaacgaacaaaacagagaag

SEQ ID NO: 1056408 - DNA, 33 bp, Homo sapien
acagtgaagttgacaaggaacaaaacagagaag

SEQ ID NO: 1056409 - DNA, 33 bp, Homo sapien
tcctgtatttgttcaaacttgatatccataaca

SEQ ID NO: 1056410 - DNA, 33 bp, Homo sapien
tcctgtatttgttcaaccttgatatccataaca

SEQ ID NO: 1056411 - DNA, 33 bp, Homo sapien
tatctcaggcctgttagattgacttataagaaa

SEQ ID NO: 1056412 - DNA, 33 bp, Homo sapien
tatctcaggcctgttatattgacttataagaaa

SEQ ID NO: 1056413 - DNA, 33 bp, Homo sapien
tctgttctacaaaaataatgcctccttaacatc

SEQ ID NO: 1056414 - DNA, 33 bp, Homo sapien
tctgttctacaaaaatgatgcctccttaacatc

SEQ ID NO: 1056415 - DNA, 33 bp, Homo sapien
tatatgactatactaaacaacaatgaattgaac

SEQ ID NO: 1056416 - DNA, 33 bp, Homo sapien
tatatgactatactaagcaacaatgaattgaac

SEQ ID NO: 1056417 - DNA, 33 bp, Homo sapien
attttacaggattcaacggtggaccagtacaag

SEQ ID NO: 1056418 - DNA, 33 bp, Homo sapien
attttacaggattcaatggtggaccagtacaag

SEQ ID NO: 1056419 - DNA, 33 bp, Homo sapien
taagaggagttctaaaccacaatggcatctgaa

SEQ ID NO: 1056420 - DNA, 33 bp, Homo sapien
taagaggagttctaaatcacaatggcatctgaa

SEQ ID NO: 1056421 - DNA, 33 bp, Homo sapien
cttcaccattatactacgtcttagactgccaaa

SEQ ID NO: 1056422 - DNA, 33 bp, Homo sapien
cttcaccattatactatgtcttagactgccaaa

SEQ ID NO: 1056423 - DNA, 33 bp, Homo sapien
agcacagaatgtcctaagaatttccctcaaaac

SEQ ID NO: 1056424 - DNA, 33 bp, Homo sapien
agcacagaatgtcctatgaatttccctcaaaac

SEQ ID NO: 1056425 - DNA, 33 bp, Homo sapien
caataactagattgtaggcttcttgataactgc

SEQ ID NO: 1056426 - DNA, 33 bp, Homo sapien
caataactagattgtatgcttcttgataactgc

SEQ ID NO: 1056427 - DNA, 33 bp, Homo sapien
ctgaaattcaccagtcactttattcgtcctgct

SEQ ID NO: 1056428 - DNA, 33 bp, Homo sapien
ctgaaattcaccagtcgctttattcgtcctgct

SEQ ID NO: 1056429 - DNA, 33 bp, Homo sapien
gttttgaaattaatagcagtgaagcttcagcag

SEQ ID NO: 1056430 - DNA, 33 bp, Homo sapien
gttttgaaattaatagtagtgaagcttcagcag

SEQ ID NO: 1056431 - DNA, 33 bp, Homo sapien
gcttgcatctttgttgatctaccaatctccatc

SEQ ID NO: 1056432 - DNA, 33 bp, Homo sapien
gcttgcatctttgttggtctaccaatctccatc

SEQ ID NO: 1056433 - DNA, 33 bp, Homo sapien
taatggagtaacgaacagcaggtgacttgaagg

SEQ ID NO: 1056434 - DNA, 33 bp, Homo sapien
taatggagtaacgaaccgcaggtgacttgaagg

SEQ ID NO: 1056435 - DNA, 33 bp, Homo sapien
ctaccaacactgttaccaagcaaagactatttc

SEQ ID NO: 1056436 - DNA, 33 bp, Homo sapien
ctaccaacactgttacgaagcaaagactatttc

SEQ ID NO: 1056437 - DNA, 33 bp, Homo sapien
gctgtaactggaacccactgttaactcagcccc

SEQ ID NO: 1056438 - DNA, 33 bp, Homo sapien
gctgtaactggaacccgctgttaactcagcccc

SEQ ID NO: 1056439 - DNA, 33 bp, Homo sapien
cattatgacaggcttaaattttgaaagagccac

SEQ ID NO: 1056440 - DNA, 33 bp, Homo sapien
cattatgacaggcttacattttgaaagagccac

SEQ ID NO: 1056441 - DNA, 33 bp, Homo sapien
tatcccctttgttaagccatgcatgattgtatt

SEQ ID NO: 1056442 - DNA, 33 bp, Homo sapien
tatcccctttgttaaggcatgcatgattgtatt

SEQ ID NO: 1056443 - DNA, 33 bp, Homo sapien
tcctgctaaaaattaactgtaaaatagtctcag

SEQ ID NO: 1056444 - DNA, 33 bp, Homo sapien
tcctgctaaaaattaagtgtaaaatagtctcag

SEQ ID NO: 1056445 - DNA, 33 bp, Homo sapien
tagttactagcaccaacgaaaaattgaacaagg

SEQ ID NO: 1056446 - DNA, 33 bp, Homo sapien
tagttactagcaccaatgaaaaattgaacaagg

SEQ ID NO: 1056447 - DNA, 33 bp, Homo sapien
aataacttgcgcctgaataactgctgggtaaag

SEQ ID NO: 1056448 - DNA, 33 bp, Homo sapien
aataacttgcgcctgagtaactgctgggtaaag

SEQ ID NO: 1056449 - DNA, 33 bp, Homo sapien
tagctagattaacacaagagtaaagaaaagaag

SEQ ID NO: 1056450 - DNA, 33 bp, Homo sapien
tagctagattaacacaggagtaaagaaaagaag

SEQ ID NO: 1056451 - DNA, 33 bp, Homo sapien
caggaagaaggagctacgtgatattcatattta

SEQ ID NO: 1056452 - DNA, 33 bp, Homo sapien
caggaagaaggagctatgtgatattcatattta

SEQ ID NO: 1056453 - DNA, 33 bp, Homo sapien
gctacactgtcagtgaactgaaggggaaataaa

SEQ ID NO: 1056454 - DNA, 33 bp, Homo sapien
gctacactgtcagtgacctgaaggggaaataaa

SEQ ID NO: 1056455 - DNA, 33 bp, Homo sapien
acatatgttagtcgtaacagttgtcactcagtc

SEQ ID NO: 1056456 - DNA, 33 bp, Homo sapien
acatatgttagtcgtaccagttgtcactcagtc

SEQ ID NO: 1056457 - DNA, 33 bp, Homo sapien
gaggactgtcaagcacacgttgcataaccactg

SEQ ID NO: 1056458 - DNA, 33 bp, Homo sapien
gaggactgtcaagcacccgttgcataaccactg

SEQ ID NO: 1056459 - DNA, 33 bp, Homo sapien
gtgaaacgagttgaaaatactttcgcataatgt

SEQ ID NO: 1056460 - DNA, 33 bp, Homo sapien
gtgaaacgagttgaaactactttcgcataatgt

SEQ ID NO: 1056461 - DNA, 33 bp, Homo sapien
gctgtagaaaataaacccatgcgaagacttgga

SEQ ID NO: 1056462 - DNA, 33 bp, Homo sapien
gctgtagaaaataaactcatgcgaagacttgga

SEQ ID NO: 1056463 - DNA, 33 bp, Homo sapien
ttcacggacaaaattacgtggacggactggcat

SEQ ID NO: 1056464 - DNA, 33 bp, Homo sapien
ttcacggacaaaattatgtggacggactggcat

SEQ ID NO: 1056465 - DNA, 33 bp, Homo sapien
gactaagaaatatctgaaagtacacaatgcaag

SEQ ID NO: 1056466 - DNA, 33 bp, Homo sapien
gactaagaaatatctggaagtacacaatgcaag

SEQ ID NO: 1056467 - DNA, 33 bp, Homo sapien
caccaattccaggaacaggtagataatgggtga

SEQ ID NO: 1056468 - DNA, 33 bp, Homo sapien
caccaattccaggaacgggtagataatgggtga

SEQ ID NO: 1056469 - DNA, 33 bp, Homo sapien
cctcatttttgttaacagctaaattatctatat

SEQ ID NO: 1056470 - DNA, 33 bp, Homo sapien
cctcatttttgttaacggctaaattatctatat

SEQ ID NO: 1056471 - DNA, 33 bp, Homo sapien
gaagtaaatttgccaaaatgaaacctgtcttat

SEQ ID NO: 1056472 - DNA, 33 bp, Homo sapien
gaagtaaatttgccaagatgaaacctgtcttat

SEQ ID NO: 1056473 - DNA, 33 bp, Homo sapien
aggaagcatcaatgtacgactctggaatttctg

SEQ ID NO: 1056474 - DNA, 33 bp, Homo sapien
aggaagcatcaatgtatgactctggaatttctg

SEQ ID NO: 1056475 - DNA, 33 bp, Homo sapien
ccaagaggcccatggaagatgtgcaataagaag

SEQ ID NO: 1056476 - DNA, 33 bp, Homo sapien
ccaagaggcccatggaggatgtgcaataagaag

SEQ ID NO: 1056477 - DNA, 33 bp, Homo sapien
tgtatcttgcctcaggaaaaattgtcagttata

SEQ ID NO: 1056478 - DNA, 33 bp, Homo sapien
tgtatcttgcctcagggaaaattgtcagttata

SEQ ID NO: 1056479 - DNA, 33 bp, Homo sapien
gatgaattagcacaccaagaggttcttttattc

SEQ ID NO: 1056480 - DNA, 33 bp, Homo sapien
gatgaattagcacaccgagaggttcttttattc

SEQ ID NO: 1056481 - DNA, 33 bp, Homo sapien
aatgccaggttatttacagatcgttgctgcaac

SEQ ID NO: 1056482 - DNA, 33 bp, Homo sapien
aatgccaggttatttatagatcgttgctgcaac

SEQ ID NO: 1056483 - DNA, 33 bp, Homo sapien
aatactccaacaggcaacattttctataaaaaa

SEQ ID NO: 1056484 - DNA, 33 bp, Homo sapien
aatactccaacaggcatcattttctataaaaaa

SEQ ID NO: 1056485 - DNA, 33 bp, Homo sapien
ataaaatcagacattaaccaaacaactccaaag

SEQ ID NO: 1056486 - DNA, 33 bp, Homo sapien
ataaaatcagacattagccaaacaactccaaag

SEQ ID NO: 1056487 - DNA, 33 bp, Homo sapien
cacaaagacacaatgccatcagttccctgcagt

SEQ ID NO: 1056488 - DNA, 33 bp, Homo sapien
cacaaagacacaatgctatcagttccctgcagt

SEQ ID NO: 1056489 - DNA, 33 bp, Homo sapien
agactacaggaaaggaaatgattgattctatct

SEQ ID NO: 1056490 - DNA, 33 bp, Homo sapien
agactacaggaaaggacatgattgattctatct

SEQ ID NO: 1056491 - DNA, 33 bp, Homo sapien
aatgttcttcctaaatcaaaccatcttgcttat

SEQ ID NO: 1056492 - DNA, 33 bp, Homo sapien
aatgttcttcctaaattaaaccatcttgcttat

SEQ ID NO: 1056493 - DNA, 33 bp, Homo sapien
agtttcaccaaaattaacctttcatatatataa

SEQ ID NO: 1056494 - DNA, 33 bp, Homo sapien
agtttcaccaaaattatcctttcatatatataa

SEQ ID NO: 1056495 - DNA, 33 bp, Homo sapien
tttggttaccattaaactgtatggcaaatactc

SEQ ID NO: 1056496 - DNA, 33 bp, Homo sapien
tttggttaccattaaattgtatggcaaatactc

SEQ ID NO: 1056497 - DNA, 33 bp, Homo sapien
agtttggttggataatcatatgctaggaggttt

SEQ ID NO: 1056498 - DNA, 33 bp, Homo sapien
agtttggttggataattatatgctaggaggttt

SEQ ID NO: 1056499 - DNA, 33 bp, Homo sapien
ttgatattaatcttgacgtatctttgcaaagat

SEQ ID NO: 1056500 - DNA, 33 bp, Homo sapien
ttgatattaatcttgatgtatctttgcaaagat

SEQ ID NO: 1056501 - DNA, 33 bp, Homo sapien
tatgctgtaaagcagaatacttcatttaatgtc

SEQ ID NO: 1056502 - DNA, 33 bp, Homo sapien
tatgctgtaaagcagagtacttcatttaatgtc

SEQ ID NO: 1056503 - DNA, 33 bp, Homo sapien
tgcaggattgcttatgacacctttcatttagat

SEQ ID NO: 1056504 - DNA, 33 bp, Homo sapien
tgcaggattgcttatggcacctttcatttagat

SEQ ID NO: 1056505 - DNA, 33 bp, Homo sapien
ctcccccagcaagtatcaatgaagcatcatgca

SEQ ID NO: 1056506 - DNA, 33 bp, Homo sapien
ctcccccagcaagtattaatgaagcatcatgca

SEQ ID NO: 1056507 - DNA, 33 bp, Homo sapien
acaggaggcttttaggaagaaagagctacttat

SEQ ID NO: 1056508 - DNA, 33 bp, Homo sapien
acaggaggcttttagggagaaagagctacttat

SEQ ID NO: 1056509 - DNA, 33 bp, Homo sapien
gaattgcatgacttctgaaagtagtagactcat

SEQ ID NO: 1056510 - DNA, 33 bp, Homo sapien
gaattgcatgacttcttaaagtagtagactcat

SEQ ID NO: 1056511 - DNA, 33 bp, Homo sapien
agtacggacataagccagaagtggagaacccat

SEQ ID NO: 1056512 - DNA, 33 bp, Homo sapien
agtacggacataagccggaagtggagaacccat

SEQ ID NO: 1056513 - DNA, 33 bp, Homo sapien
ggctctatcaacaaggaacactatgggcaaatt

SEQ ID NO: 1056514 - DNA, 33 bp, Homo sapien
ggctctatcaacaagggacactatgggcaaatt

SEQ ID NO: 1056515 - DNA, 33 bp, Homo sapien
gcattctgtataacacaaaggtaacaaaaataa

SEQ ID NO: 1056516 - DNA, 33 bp, Homo sapien
gcattctgtataacacgaaggtaacaaaaataa

SEQ ID NO: 1056517 - DNA, 33 bp, Homo sapien
caacggggaacacaccaggatgagaaacttagt

SEQ ID NO: 1056518 - DNA, 33 bp, Homo sapien
caacggggaacacacccggatgagaaacttagt

SEQ ID NO: 1056519 - DNA, 33 bp, Homo sapien
ctccactgatgtcatagctaccctttaaagtgt

SEQ ID NO: 1056520 - DNA, 33 bp, Homo sapien
ctccactgatgtcatatctaccctttaaagtgt

SEQ ID NO: 1056521 - DNA, 33 bp, Homo sapien
tcatggcagtatttaacgtttctacaatggacg

SEQ ID NO: 1056522 - DNA, 33 bp, Homo sapien
tcatggcagtatttaatgtttctacaatggacg

SEQ ID NO: 1056523 - DNA, 33 bp, Homo sapien
tcttatgagaacaaaaagcactgggaactatga

SEQ ID NO: 1056524 - DNA, 33 bp, Homo sapien
tcttatgagaacaaaaggcactgggaactatga

SEQ ID NO: 1056525 - DNA, 33 bp, Homo sapien
tgattacttaggatgaaattatagtacattaga

SEQ ID NO: 1056526 - DNA, 33 bp, Homo sapien
tgattacttaggatgagattatagtacattaga

SEQ ID NO: 1056527 - DNA, 33 bp, Homo sapien
tgcctttgaggaaaaaaatgcttaaaactagca

SEQ ID NO: 1056528 - DNA, 33 bp, Homo sapien
tgcctttgaggaaaaagatgcttaaaactagca

SEQ ID NO: 1056529 - DNA, 33 bp, Homo sapien
gtaaagatatggtcagaaggtcaagttccagaa

SEQ ID NO: 1056530 - DNA, 33 bp, Homo sapien
gtaaagatatggtcagcaggtcaagttccagaa

SEQ ID NO: 1056531 - DNA, 33 bp, Homo sapien
tgtaccttgaagctcccagatttgtttcaaggc

SEQ ID NO: 1056532 - DNA, 33 bp, Homo sapien
tgtaccttgaagctcctagatttgtttcaaggc

SEQ ID NO: 1056533 - DNA, 33 bp, Homo sapien
ttccacattggtcaacaaaagatgtcccccagc

SEQ ID NO: 1056534 - DNA, 33 bp, Homo sapien
ttccacattggtcaacgaaagatgtcccccagc

SEQ ID NO: 1056535 - DNA, 33 bp, Homo sapien
tttcgccatgtgcctgcactggaatctctgaat

SEQ ID NO: 1056536 - DNA, 33 bp, Homo sapien
tttcgccatgtgcctgtactggaatctctgaat

SEQ ID NO: 1056537 - DNA, 33 bp, Homo sapien
cttggaggagatattggatatgcaggactcagt

SEQ ID NO: 1056538 - DNA, 33 bp, Homo sapien
cttggaggagatattgtatatgcaggactcagt

SEQ ID NO: 1056539 - DNA, 33 bp, Homo sapien
agactaaaatatgccaagcccaaagtttgatcc

SEQ ID NO: 1056540 - DNA, 33 bp, Homo sapien
agactaaaatatgccacgcccaaagtttgatcc

SEQ ID NO: 1056541 - DNA, 33 bp, Homo sapien
actggctacattccaccgatgtactttctgcca

SEQ ID NO: 1056542 - DNA, 33 bp, Homo sapien
actggctacattccactgatgtactttctgcca

SEQ ID NO: 1056543 - DNA, 33 bp, Homo sapien
atgaaggtaattgagaataagttatttagatgc

SEQ ID NO: 1056544 - DNA, 33 bp, Homo sapien
atgaaggtaattgagagtaagttatttagatgc

SEQ ID NO: 1056545 - DNA, 33 bp, Homo sapien
cccttaaaattgtcaagaagactcaacacaagc

SEQ ID NO: 1056546 - DNA, 33 bp, Homo sapien
cccttaaaattgtcaataagactcaacacaagc

SEQ ID NO: 1056547 - DNA, 33 bp, Homo sapien
atatagtcagtgacaacttgattctattgggcc

SEQ ID NO: 1056548 - DNA, 33 bp, Homo sapien
atatagtcagtgacaatttgattctattgggcc

SEQ ID NO: 1056549 - DNA, 33 bp, Homo sapien
gatttctagcatacagaaggaatcggagaatag

SEQ ID NO: 1056550 - DNA, 33 bp, Homo sapien
gatttctagcatacaggaggaatcggagaatag

SEQ ID NO: 1056551 - DNA, 33 bp, Homo sapien
tagggccaggagccagactctgggaatatcttc

SEQ ID NO: 1056552 - DNA, 33 bp, Homo sapien
tagggccaggagccagtctctgggaatatcttc

SEQ ID NO: 1056553 - DNA, 33 bp, Homo sapien
atttaagtagaatgacaaaagaaatggcgacaa

SEQ ID NO: 1056554 - DNA, 33 bp, Homo sapien
atttaagtagaatgacgaaagaaatggcgacaa

SEQ ID NO: 1056555 - DNA, 33 bp, Homo sapien
atctcatttttaatcaaagtcagtcactggtat

SEQ ID NO: 1056556 - DNA, 33 bp, Homo sapien
atctcatttttaatcagagtcagtcactggtat

SEQ ID NO: 1056557 - DNA, 33 bp, Homo sapien
agaaacttgcctgaaacttatgattagtaaatg

SEQ ID NO: 1056558 - DNA, 33 bp, Homo sapien
agaaacttgcctgaaatttatgattagtaaatg

SEQ ID NO: 1056559 - DNA, 33 bp, Homo sapien
ggggatagatttgtcaaactctctcttacactt

SEQ ID NO: 1056560 - DNA, 33 bp, Homo sapien
ggggatagatttgtcacactctctcttacactt

SEQ ID NO: 1056561 - DNA, 33 bp, Homo sapien
acaatttcagcttttcaatattatcctgagatg

SEQ ID NO: 1056562 - DNA, 33 bp, Homo sapien
acaatttcagcttttcgatattatcctgagatg

SEQ ID NO: 1056563 - DNA, 33 bp, Homo sapien
actgaggcctaaaggaataacttgaccaggttt

SEQ ID NO: 1056564 - DNA, 33 bp, Homo sapien
actgaggcctaaaggagtaacttgaccaggttt

SEQ ID NO: 1056565 - DNA, 33 bp, Homo sapien
atcaataactaatgtccaccctctatagaaatg

SEQ ID NO: 1056566 - DNA, 33 bp, Homo sapien
atcaataactaatgtctaccctctatagaaatg

SEQ ID NO: 1056567 - DNA, 33 bp, Homo sapien
ataaacctgctcaaaaaaggtgtagtataactt

SEQ ID NO: 1056568 - DNA, 33 bp, Homo sapien
ataaacctgctcaaaagaggtgtagtataactt

SEQ ID NO: 1056569 - DNA, 33 bp, Homo sapien
gcaccttgaatcccccaaataatcatcctggtc

SEQ ID NO: 1056570 - DNA, 33 bp, Homo sapien
gcaccttgaatcccccgaataatcatcctggtc

SEQ ID NO: 1056571 - DNA, 33 bp, Homo sapien
ctcttacagcaaaaaggaggggtattagctgac

SEQ ID NO: 1056572 - DNA, 33 bp, Homo sapien
ctcttacagcaaaaagtaggggtattagctgac

SEQ ID NO: 1056573 - DNA, 33 bp, Homo sapien
aagggctaatacaccacgtttggtcagctggaa

SEQ ID NO: 1056574 - DNA, 33 bp, Homo sapien
aagggctaatacaccaggtttggtcagctggaa

SEQ ID NO: 1056575 - DNA, 33 bp, Homo sapien
aggcctcaaagtccaacgtttttgcagcctgtt

SEQ ID NO: 1056576 - DNA, 33 bp, Homo sapien
aggcctcaaagtccaatgtttttgcagcctgtt

SEQ ID NO: 1056577 - DNA, 33 bp, Homo sapien
gtgcaatccatgtctcaagtgaagaagaggaac

SEQ ID NO: 1056578 - DNA, 33 bp, Homo sapien
gtgcaatccatgtctcgagtgaagaagaggaac

SEQ ID NO: 1056579 - DNA, 33 bp, Homo sapien
caggtttagcttggaaaaaactgaatcacacat

SEQ ID NO: 1056580 - DNA, 33 bp, Homo sapien
caggtttagcttggaagaaactgaatcacacat

SEQ ID NO: 1056581 - DNA, 33 bp, Homo sapien; identical to SEQ ID NO: 1056579

SEQ ID NO: 1056582 - DNA, 33 bp, Homo sapien; identical to SEQ ID NO: 1056580

SEQ ID NO: 1056583 - DNA, 33 bp, Homo sapien
atgggaataattaacaccctggtattgtaacct

SEQ ID NO: 1056584 - DNA, 33 bp, Homo sapien
atgggaataattaacatcctggtattgtaacct

SEQ ID NO: 1056585 - DNA, 33 bp, Homo sapien
taactttagctcatgcagaacattgactaaaaa

SEQ ID NO: 1056586 - DNA, 33 bp, Homo sapien
taactttagctcatgcggaacattgactaaaaa

SEQ ID NO: 1056587 - DNA, 33 bp, Homo sapien
taattcagaaacagaaagcacagagaaaggatt

SEQ ID NO: 1056588 - DNA, 33 bp, Homo sapien
taattcagaaacagaatgcacagagaaaggatt

SEQ ID NO: 1056589 - DNA, 33 bp, Homo sapien
agactacagataaaaaatgtatgagctaattca

SEQ ID NO: 1056590 - DNA, 33 bp, Homo sapien
agactacagataaaaactgtatgagctaattca

SEQ ID NO: 1056591 - DNA, 33 bp, Homo sapien
aaaagcaaaaaaaagacgggatagtgattatgc

SEQ ID NO: 1056592 - DNA, 33 bp, Homo sapien
aaaagcaaaaaaaagatgggatagtgattatgc

SEQ ID NO: 1056593 - DNA, 33 bp, Homo sapien
cttaattcagcaaccacgcaatgaaaaagccca

SEQ ID NO: 1056594 - DNA, 33 bp, Homo sapien
cttaattcagcaaccatgcaatgaaaaagccca

SEQ ID NO: 1056595 - DNA, 33 bp, Homo sapien
aaattgtctgaatagcaatcccagtagatatag

SEQ ID NO: 1056596 - DNA, 33 bp, Homo sapien
aaattgtctgaatagcgatcccagtagatatag

SEQ ID NO: 1056597 - DNA, 33 bp, Homo sapien
caaggctgctttctcagctctgaatataactgt

SEQ ID NO: 1056598 - DNA, 33 bp, Homo sapien
caaggctgctttctcatctctgaatataactgt

SEQ ID NO: 1056599 - DNA, 33 bp, Homo sapien
tcctaggtggtggagcacaaaattgaatatata

SEQ ID NO: 1056600 - DNA, 33 bp, Homo sapien
tcctaggtggtggagcgcaaaattgaatatata

SEQ ID NO: 1056601 - DNA, 33 bp, Homo sapien
acataaattttcagacaatatggattcctatag

SEQ ID NO: 1056602 - DNA, 33 bp, Homo sapien
acataaattttcagactatatggattcctatag

SEQ ID NO: 1056603 - DNA, 33 bp, Homo sapien
taaacttttgaaaatacgggatctaataggacc

SEQ ID NO: 1056604 - DNA, 33 bp, Homo sapien
taaacttttgaaaatatgggatctaataggacc

SEQ ID NO: 1056605 - DNA, 33 bp, Homo sapien
atttcatcataggaacactaattattgtgcatt

SEQ ID NO: 1056606 - DNA, 33 bp, Homo sapien
atttcatcataggaacgctaattattgtgcatt

SEQ ID NO: 1056607 - DNA, 33 bp, Homo sapien
ggagcactttgcaaagccatatactggtgaata

SEQ ID NO: 1056608 - DNA, 33 bp, Homo sapien
ggagcactttgcaaagtcatatactggtgaata

SEQ ID NO: 1056609 - DNA, 33 bp, Homo sapien
cacagagaaaccaggccagtttttgcaagaatg

SEQ ID NO: 1056610 - DNA, 33 bp, Homo sapien
cacagagaaaccaggcgagtttttgcaagaatg

SEQ ID NO: 1056611 - DNA, 33 bp, Homo sapien
tcttcaagcacaagaaagagctttataggatgg

SEQ ID NO: 1056612 - DNA, 33 bp, Homo sapien
tcttcaagcacaagaaggagctttataggatgg

SEQ ID NO: 1056613 - DNA, 33 bp, Homo sapien
gaaacagaaggggaaacaaggcaagaataaagg

SEQ ID NO: 1056614 - DNA, 33 bp, Homo sapien
gaaacagaaggggaaataaggcaagaataaagg

SEQ ID NO: 1056615 - DNA, 33 bp, Homo sapien
gttagcattttaaataaatattctgaccaaccc

SEQ ID NO: 1056616 - DNA, 33 bp, Homo sapien
gttagcattttaaatacatattctgaccaaccc

SEQ ID NO: 1056617 - DNA, 33 bp, Homo sapien
aataaccaacaaagtacaccatctgccaatggg

SEQ ID NO: 1056618 - DNA, 33 bp, Homo sapien
aataaccaacaaagtataccatctgccaatggg

SEQ ID NO: 1056619 - DNA, 33 bp, Homo sapien
gtcaatactgtcactaataagtgttgagacact

SEQ ID NO: 1056620 - DNA, 33 bp, Homo sapien
gtcaatactgtcactactaagtgttgagacact

SEQ ID NO: 1056621 - DNA, 33 bp, Homo sapien
tgccatggagggaaaggacattacctaaaataa

SEQ ID NO: 1056622 - DNA, 33 bp, Homo sapien
tgccatggagggaaagtacattacctaaaataa

SEQ ID NO: 1056623 - DNA, 33 bp, Homo sapien
ttacactttgcattggaacattacatccaaatc

SEQ ID NO: 1056624 - DNA, 33 bp, Homo sapien
ttacactttgcattgggacattacatccaaatc

SEQ ID NO: 1056625 - DNA, 33 bp, Homo sapien
actgcatgaagagataaagtctttgaagataaa

SEQ ID NO: 1056626 - DNA, 33 bp, Homo sapien
actgcatgaagagatacagtctttgaagataaa

SEQ ID NO: 1056627 - DNA, 33 bp, Homo sapien
tttaaggttgcctatacaaacctccaagcttca

SEQ ID NO: 1056628 - DNA, 33 bp, Homo sapien
tttaaggttgcctatataaacctccaagcttca

SEQ ID NO: 1056629 - DNA, 33 bp, Homo sapien
agctcagcaaacaagaaactaaacttcatgaca

SEQ ID NO: 1056630 - DNA, 33 bp, Homo sapien
agctcagcaaacaagacactaaacttcatgaca

SEQ ID NO: 1056631 - DNA, 33 bp, Homo sapien
cctggaatcttatacaacaaaatgacagtatat

SEQ ID NO: 1056632 - DNA, 33 bp, Homo sapien
cctggaatcttatacatcaaaatgacagtatat

SEQ ID NO: 1056633 - DNA, 33 bp, Homo sapien
ttgccctctagaaagactacgctaatgattcat

SEQ ID NO: 1056634 - DNA, 33 bp, Homo sapien
ttgccctctagaaagagtacgctaatgattcat

SEQ ID NO: 1056635 - DNA, 33 bp, Homo sapien
aaaatcttaagttggacagtataaaatcttcac

SEQ ID NO: 1056636 - DNA, 33 bp, Homo sapien
aaaatcttaagttggatagtataaaatcttcac

SEQ ID NO: 1056637 - DNA, 33 bp, Homo sapien
aaggctgtttacttgacagtatggtgtttgtta

SEQ ID NO: 1056638 - DNA, 33 bp, Homo sapien
aaggctgtttacttgatagtatggtgtttgtta

SEQ ID NO: 1056639 - DNA, 33 bp, Homo sapien
ttaccttcaaaagtgaaacaagaagattcaaat

SEQ ID NO: 1056640 - DNA, 33 bp, Homo sapien
ttaccttcaaaagtgagacaagaagattcaaat

SEQ ID NO: 1056641 - DNA, 33 bp, Homo sapien
tgctggatgttagaacaatacattctgctactt

SEQ ID NO: 1056642 - DNA, 33 bp, Homo sapien
tgctggatgttagaacgatacattctgctactt

SEQ ID NO: 1056643 - DNA, 33 bp, Homo sapien
aaactgatgcttcaaccgggctgattcttggag

SEQ ID NO: 1056644 - DNA, 33 bp, Homo sapien
aaactgatgcttcaactgggctgattcttggag

SEQ ID NO: 1056645 - DNA, 33 bp, Homo sapien
agagtcatctgggagactaatgagagaaaggag

SEQ ID NO: 1056646 - DNA, 33 bp, Homo sapien
agagtcatctgggagattaatgagagaaaggag

SEQ ID NO: 1056647 - DNA, 33 bp, Homo sapien
gccaaattctgggtcactaaaaagagggaaatg

SEQ ID NO: 1056648 - DNA, 33 bp, Homo sapien
gccaaattctgggtcattaaaaagagggaaatg

SEQ ID NO: 1056649 - DNA, 33 bp, Homo sapien
tcatttttaaggcagacggtgtataactttgct

SEQ ID NO: 1056650 - DNA, 33 bp, Homo sapien
tcatttttaaggcagatggtgtataactttgct

SEQ ID NO: 1056651 - DNA, 33 bp, Homo sapien
gtgaatctcatcctgactaatttcgcacaaaat

SEQ ID NO: 1056652 - DNA, 33 bp, Homo sapien
gtgaatctcatcctgattaatttcgcacaaaat

SEQ ID NO: 1056653 - DNA, 33 bp, Homo sapien
aaggcaggtagacaataaggaaatggtgataac

SEQ ID NO: 1056654 - DNA, 33 bp, Homo sapien
aaggcaggtagacaatgaggaaatggtgataac

SEQ ID NO: 1056655 - DNA, 33 bp, Homo sapien
tcaatgatgaattacaaggtcagaaaggggtaa

SEQ ID NO: 1056656 - DNA, 33 bp, Homo sapien
tcaatgatgaattacacggtcagaaaggggtaa

SEQ ID NO: 1056657 - DNA, 33 bp, Homo sapien
atgttcacaaagcaataactgaatgaagctgat

SEQ ID NO: 1056658 - DNA, 33 bp, Homo sapien
atgttcacaaagcaatcactgaatgaagctgat

SEQ ID NO: 1056659 - DNA, 33 bp, Homo sapien
aataggaaatgtcttacgatgcacaggaatgtt

SEQ ID NO: 1056660 - DNA, 33 bp, Homo sapien
aataggaaatgtcttatgatgcacaggaatgtt

SEQ ID NO: 1056661 - DNA, 33 bp, Homo sapien
ttgaatggttgcttcacggtttcaagatgctct

SEQ ID NO: 1056662 - DNA, 33 bp, Homo sapien
ttgaatggttgcttcatggtttcaagatgctct

SEQ ID NO: 1056663 - DNA, 33 bp, Homo sapien
attcatccagtgctgaagaagatttagtttcat

SEQ ID NO: 1056664 - DNA, 33 bp, Homo sapien
attcatccagtgctgacgaagatttagtttcat

SEQ ID NO: 1056665 - DNA, 33 bp, Homo sapien
ttccctagtctgcttacgcaagagttaagaaaa

SEQ ID NO: 1056666 - DNA, 33 bp, Homo sapien
ttccctagtctgcttatgcaagagttaagaaaa

SEQ ID NO: 1056667 - DNA, 33 bp, Homo sapien
agactttataatcgaacacgtcaataccatcca

SEQ ID NO: 1056668 - DNA, 33 bp, Homo sapien
agactttataatcgaatacgtcaataccatcca

SEQ ID NO: 1056669 - DNA, 33 bp, Homo sapien
ggctttattcaggataacaaaggtctgaaatca

SEQ ID NO: 1056670 - DNA, 33 bp, Homo sapien
ggctttattcaggatagcaaaggtctgaaatca

SEQ ID NO: 1056671 - DNA, 33 bp, Homo sapien
gaagcctttcttgccacatgatttccactgaac

SEQ ID NO: 1056672 - DNA, 33 bp, Homo sapien
gaagcctttcttgccatatgatttccactgaac

SEQ ID NO: 1056673 - DNA, 33 bp, Homo sapien
ggtgggcatcttcacaatgagttgcctgggaat

SEQ ID NO: 1056674 - DNA, 33 bp, Homo sapien
ggtgggcatcttcacagtgagttgcctgggaat

SEQ ID NO: 1056675 - DNA, 33 bp, Homo sapien
gtcagaatttccagaaaaccttaactgagaagc

SEQ ID NO: 1056676 - DNA, 33 bp, Homo sapien
gtcagaatttccagaacaccttaactgagaagc

SEQ ID NO: 1056677 - DNA, 33 bp, Homo sapien
gctgaaaaatcaaccactagttaggagatctaa

SEQ ID NO: 1056678 - DNA, 33 bp, Homo sapien
gctgaaaaatcaaccattagttaggagatctaa

SEQ ID NO: 1056679 - DNA, 33 bp, Homo sapien
gctgttgagacaaatacgaacctctgctacatg

SEQ ID NO: 1056680 - DNA, 33 bp, Homo sapien
gctgttgagacaaatatgaacctctgctacatg

SEQ ID NO: 1056681 - DNA, 33 bp, Homo sapien
tctcctagcactgaaaagacaaaatcagtcaca

SEQ ID NO: 1056682 - DNA, 33 bp, Homo sapien
tctcctagcactgaaatgacaaaatcagtcaca

SEQ ID NO: 1056683 - DNA, 33 bp, Homo sapien
attgtcattctctatgcaaagaaaagggtgtgt

SEQ ID NO: 1056684 - DNA, 33 bp, Homo sapien
attgtcattctctatggaaagaaaagggtgtgt

SEQ ID NO: 1056685 - DNA, 33 bp, Homo sapien
accaggtcatttatttctcagcctgatgataga

SEQ ID NO: 1056686 - DNA, 33 bp, Homo sapien
accaggtcatttatttgtcagcctgatgataga

SEQ ID NO: 1056687 - DNA, 33 bp, Homo sapien
gaatctgtggaagtgaaatttgcgaatcagtat

SEQ ID NO: 1056688 - DNA, 33 bp, Homo sapien
gaatctgtggaagtgagatttgcgaatcagtat

SEQ ID NO: 1056689 - DNA, 33 bp, Homo sapien
ttctaaaacaatctccaaattccactgacttat

SEQ ID NO: 1056690 - DNA, 33 bp, Homo sapien
ttctaaaacaatctccgaattccactgacttat

SEQ ID NO: 1056691 - DNA, 33 bp, Homo sapien
aaattcctaactgtcacgtaaagatgtaacata

SEQ ID NO: 1056692 - DNA, 33 bp, Homo sapien
aaattcctaactgtcatgtaaagatgtaacata

SEQ ID NO: 1056693 - DNA, 33 bp, Homo sapien
caagtgctacctttgaacctggtctttctcttc

SEQ ID NO: 1056694 - DNA, 33 bp, Homo sapien
caagtgctacctttgagcctggtctttctcttc

SEQ ID NO: 1056695 - DNA, 33 bp, Homo sapien
tagtgtcttgtcaaaaacctcattcattctggt

SEQ ID NO: 1056696 - DNA, 33 bp, Homo sapien
tagtgtcttgtcaaaagcctcattcattctggt

SEQ ID NO: 1056697 - DNA, 33 bp, Homo sapien
gtggcaaatctcctaaaagacatggttaggaac

SEQ ID NO: 1056698 - DNA, 33 bp, Homo sapien
gtggcaaatctcctaacagacatggttaggaac

SEQ ID NO: 1056699 - DNA, 33 bp, Homo sapien
ctactacttttggatacggtttgaataaatact

SEQ ID NO: 1056700 - DNA, 33 bp, Homo sapien
ctactacttttggatatggtttgaataaatact

SEQ ID NO: 1056701 - DNA, 33 bp, Homo sapien
ttaggggactaactaacgcagctgactctcagt

SEQ ID NO: 1056702 - DNA, 33 bp, Homo sapien
ttaggggactaactaatgcagctgactctcagt

SEQ ID NO: 1056703 - DNA, 33 bp, Homo sapien
tggcccagtcaaccacaaggagggctcatcagg

SEQ ID NO: 1056704 - DNA, 33 bp, Homo sapien
tggcccagtcaaccacgaggagggctcatcagg

SEQ ID NO: 1056705 - DNA, 33 bp, Homo sapien
aatgtgggcaggcaaccaattgattgcttccag

SEQ ID NO: 1056706 - DNA, 33 bp, Homo sapien
aatgtgggcaggcaactaattgattgcttccag

SEQ ID NO: 1056707 - DNA, 33 bp, Homo sapien
tcaaaaggctacttaccgcaattaactgggtct

SEQ ID NO: 1056708 - DNA, 33 bp, Homo sapien
tcaaaaggctacttactgcaattaactgggtct

SEQ ID NO: 1056709 - DNA, 33 bp, Homo sapien
cctggttgtagatggactcacaggcttcagctg

SEQ ID NO: 1056710 - DNA, 33 bp, Homo sapien
cctggttgtagatggattcacaggcttcagctg

SEQ ID NO: 1056711 - DNA, 33 bp, Homo sapien
gccatttgacctttaaggcagacttcttgactt

SEQ ID NO: 1056712 - DNA, 33 bp, Homo sapien
gccatttgacctttaatgcagacttcttgactt

SEQ ID NO: 1056713 - DNA, 33 bp, Homo sapien
atttaagccactgtgaatagcactgtttgttac

SEQ ID NO: 1056714 - DNA, 33 bp, Homo sapien
atttaagccactgtgagtagcactgtttgttac

SEQ ID NO: 1056715 - DNA, 33 bp, Homo sapien
cattgccagaaaaacacgatttaaagatgaagg

SEQ ID NO: 1056716 - DNA, 33 bp, Homo sapien
cattgccagaaaaacatgatttaaagatgaagg

SEQ ID NO: 1056717 - DNA, 33 bp, Homo sapien
cttttattctgaggataactgccaaaactgagc

SEQ ID NO: 1056718 - DNA, 33 bp, Homo sapien
cttttattctgaggatcactgccaaaactgagc

SEQ ID NO: 1056719 - DNA, 33 bp, Homo sapien
aaaatacattatttacagccgggtaaagtggct

SEQ ID NO: 1056720 - DNA, 33 bp, Homo sapien
aaaatacattatttacggccgggtaaagtggct

SEQ ID NO: 1056721 - DNA, 33 bp, Homo sapien
ctgtcaaagttatgtgaagagttatacacagta

SEQ ID NO: 1056722 - DNA, 33 bp, Homo sapien
ctgtcaaagttatgtgtagagttatacacagta

SEQ ID NO: 1056723 - DNA, 33 bp, Homo sapien
gtcttgggtttgggcccgagcttctgcaatttt

SEQ ID NO: 1056724 - DNA, 33 bp, Homo sapien
gtcttgggtttgggcctgagcttctgcaatttt

SEQ ID NO: 1056725 - DNA, 33 bp, Homo sapien
ctctgtaaaataacaaaacagaaagctgtgctt

SEQ ID NO: 1056726 - DNA, 33 bp, Homo sapien
ctctgtaaaataacaacacagaaagctgtgctt

SEQ ID NO: 1056727 - DNA, 33 bp, Homo sapien
ctctgctcagaccacaaatgagctgaagctgat

SEQ ID NO: 1056728 - DNA, 33 bp, Homo sapien
ctctgctcagaccacagatgagctgaagctgat

SEQ ID NO: 1056729 - DNA, 33 bp, Homo sapien
aggaaagagttaaaagcaagtcgcagagtacag

SEQ ID NO: 1056730 - DNA, 33 bp, Homo sapien
aggaaagagttaaaaggaagtcgcagagtacag

SEQ ID NO: 1056731 - DNA, 33 bp, Homo sapien
tcctggggttgaaaaaattctacagcacaagaa

SEQ ID NO: 1056732 - DNA, 33 bp, Homo sapien
tcctggggttgaaaaacttctacagcacaagaa

SEQ ID NO: 1056733 - DNA, 33 bp, Homo sapien
caaggaaactaccacaatggaatatacctacta

SEQ ID NO: 1056734 - DNA, 33 bp, Homo sapien
caaggaaactaccacagtggaatatacctacta

SEQ ID NO: 1056735 - DNA, 33 bp, Homo sapien
tggaaaatgccaaggcccaaggaaaatgctaaa

SEQ ID NO: 1056736 - DNA, 33 bp, Homo sapien
tggaaaatgccaaggctcaaggaaaatgctaaa

SEQ ID NO: 1056737 - DNA, 33 bp, Homo sapien
aagaaggtaagtgaaacgaattgtcttttttga

SEQ ID NO: 1056738 - DNA, 33 bp, Homo sapien
aagaaggtaagtgaaatgaattgtcttttttga

SEQ ID NO: 1056739 - DNA, 33 bp, Homo sapien
ttgtattttacagaagacttctctaacattgac

SEQ ID NO: 1056740 - DNA, 33 bp, Homo sapien
ttgtattttacagaagtcttctctaacattgac

SEQ ID NO: 1056741 - DNA, 33 bp, Homo sapien
tattgaagccgaagaaaaaaatactgtacagtc

SEQ ID NO: 1056742 - DNA, 33 bp, Homo sapien
tattgaagccgaagaataaaatactgtacagtc

SEQ ID NO: 1056743 - DNA, 33 bp, Homo sapien
ctacccagtctaatcaatcatcatttgaaatag

SEQ ID NO: 1056744 - DNA, 33 bp, Homo sapien
ctacccagtctaatcagtcatcatttgaaatag

SEQ ID NO: 1056745 - DNA, 33 bp, Homo sapien
gttaattcatgagggaaaaagtggtctcattct

SEQ ID NO: 1056746 - DNA, 33 bp, Homo sapien
gttaattcatgagggacaaagtggtctcattct

SEQ ID NO: 1056747 - DNA, 33 bp, Homo sapien
ataaggacttcaattagagagaggaaatattct

SEQ ID NO: 1056748 - DNA, 33 bp, Homo sapien
ataaggacttcaattatagagaggaaatattct

SEQ ID NO: 1056749 - DNA, 33 bp, Homo sapien
gagaggtctaagatgacagagcattagacatag

SEQ ID NO: 1056750 - DNA, 33 bp, Homo sapien
gagaggtctaagatgatagagcattagacatag

SEQ ID NO: 1056751 - DNA, 33 bp, Homo sapien
attttacaggagactcaaataatgcatttggcc

SEQ ID NO: 1056752 - DNA, 33 bp, Homo sapien
attttacaggagactcgaataatgcatttggcc

SEQ ID NO: 1056753 - DNA, 33 bp, Homo sapien
tacaatggacgctgtaacttttctactaactca

SEQ ID NO: 1056754 - DNA, 33 bp, Homo sapien
tacaatggacgctgtagcttttctactaactca

SEQ ID NO: 1056755 - DNA, 33 bp, Homo sapien
gaccttctcactctaaaaaactttaccggagaa

SEQ ID NO: 1056756 - DNA, 33 bp, Homo sapien
gaccttctcactctaagaaactttaccggagaa

SEQ ID NO: 1056757 - DNA, 33 bp, Homo sapien
tcaaggaggaagtaccacaaacaaaaacatatt

SEQ ID NO: 1056758 - DNA, 33 bp, Homo sapien
tcaaggaggaagtaccgcaaacaaaaacatatt

SEQ ID NO: 1056759 - DNA, 33 bp, Homo sapien
ccctagaaagctctgacactcgtaaggtagaat

SEQ ID NO: 1056760 - DNA, 33 bp, Homo sapien
ccctagaaagctctgatactcgtaaggtagaat

SEQ ID NO: 1056761 - DNA, 33 bp, Homo sapien
agcacatggaacattaacaaggatacaaaacaa

SEQ ID NO: 1056762 - DNA, 33 bp, Homo sapien
agcacatggaacattatcaaggatacaaaacaa

SEQ ID NO: 1056763 - DNA, 33 bp, Homo sapien
ttttgggaaaaatgatgacaaaagacagtctct

SEQ ID NO: 1056764 - DNA, 33 bp, Homo sapien
ttttgggaaaaatgattacaaaagacagtctct

SEQ ID NO: 1056765 - DNA, 33 bp, Homo sapien
gaaggatctataatggccaggttgttttgattt

SEQ ID NO: 1056766 - DNA, 33 bp, Homo sapien
gaaggatctataatggtcaggttgttttgattt

SEQ ID NO: 1056767 - DNA, 33 bp, Homo sapien
ccagcatttacacataaaacgcttcttgggcag

SEQ ID NO: 1056768 - DNA, 33 bp, Homo sapien
ccagcatttacacatagaacgcttcttgggcag

SEQ ID NO: 1056769 - DNA, 33 bp, Homo sapien
aggatagtcagtttcacgttattgggcagaata

SEQ ID NO: 1056770 - DNA, 33 bp, Homo sapien
aggatagtcagtttcatgttattgggcagaata

SEQ ID NO: 1056771 - DNA, 33 bp, Homo sapien
ttatgtgtagcaattactaaggttaaaataaat

SEQ ID NO: 1056772 - DNA, 33 bp, Homo sapien
ttatgtgtagcaattattaaggttaaaataaat

SEQ ID NO: 1056773 - DNA, 33 bp, Homo sapien
actgaggcatgacttaaaatacagagaggaatt

SEQ ID NO: 1056774 - DNA, 33 bp, Homo sapien
actgaggcatgacttagaatacagagaggaatt

SEQ ID NO: 1056775 - DNA, 33 bp, Homo sapien
cagctttcactatctccgacttctttaatcata

SEQ ID NO: 1056776 - DNA, 33 bp, Homo sapien
cagctttcactatctctgacttctttaatcata

SEQ ID NO: 1056777 - DNA, 33 bp, Homo sapien
gcctggtacctgaggcccttgaaaccagatgtc

SEQ ID NO: 1056778 - DNA, 33 bp, Homo sapien
gcctggtacctgaggctcttgaaaccagatgtc

SEQ ID NO: 1056779 - DNA, 33 bp, Homo sapien
tcaaatttgatttacactctaagacatcaaaca

SEQ ID NO: 1056780 - DNA, 33 bp, Homo sapien
tcaaatttgatttacattctaagacatcaaaca

SEQ ID NO: 1056781 - DNA, 33 bp, Homo sapien
ggagttcagtggtcagaatcatgcttggataca

SEQ ID NO: 1056782 - DNA, 33 bp, Homo sapien
ggagttcagtggtcaggatcatgcttggataca

SEQ ID NO: 1056783 - DNA, 33 bp, Homo sapien
gagagtacctggaggcacaaaagtgtattatct

SEQ ID NO: 1056784 - DNA, 33 bp, Homo sapien
gagagtacctggaggcgcaaaagtgtattatct

SEQ ID NO: 1056785 - DNA, 33 bp, Homo sapien
ctatctcatgacaccaatgaaatgtgttgttta

SEQ ID NO: 1056786 - DNA, 33 bp, Homo sapien
ctatctcatgacaccagtgaaatgtgttgttta

SEQ ID NO: 1056787 - DNA, 33 bp, Homo sapien
tagctttgattccaggaaagagcagggcttatt

SEQ ID NO: 1056788 - DNA, 33 bp, Homo sapien
tagctttgattccagggaagagcagggcttatt

SEQ ID NO: 1056789 - DNA, 33 bp, Homo sapien
tactagtagcaatggaagtgagtaacaataagc

SEQ ID NO: 1056790 - DNA, 33 bp, Homo sapien
tactagtagcaatggaggtgagtaacaataagc

SEQ ID NO: 1056791 - DNA, 33 bp, Homo sapien
aacagtggttggcaacaacttgggcaaccaact

SEQ ID NO: 1056792 - DNA, 33 bp, Homo sapien
aacagtggttggcaacgacttgggcaaccaact

SEQ ID NO: 1056793 - DNA, 33 bp, Homo sapien
gttgtccacagtagtaaccctttcatttacacc

SEQ ID NO: 1056794 - DNA, 33 bp, Homo sapien
gttgtccacagtagtagccctttcatttacacc

SEQ ID NO: 1056795 - DNA, 33 bp, Homo sapien
ctcagaaatatcctgccgattgctgaggatgct

SEQ ID NO: 1056796 - DNA, 33 bp, Homo sapien
ctcagaaatatcctgctgattgctgaggatgct

SEQ ID NO: 1056797 - DNA, 33 bp, Homo sapien
cccacagatagtaataagtgtgaattgttttct

SEQ ID NO: 1056798 - DNA, 33 bp, Homo sapien
cccacagatagtaataggtgtgaattgttttct

SEQ ID NO: 1056799 - DNA, 33 bp, Homo sapien
aattattaaaccactaaaactgtatgcaacatt

SEQ ID NO: 1056800 - DNA, 33 bp, Homo sapien
aattattaaaccactataactgtatgcaacatt

SEQ ID NO: 1056801 - DNA, 33 bp, Homo sapien
cccttcaaatccaagcaattctgtttaaacgtt

SEQ ID NO: 1056802 - DNA, 33 bp, Homo sapien
cccttcaaatccaagcgattctgtttaaacgtt

SEQ ID NO: 1056803 - DNA, 33 bp, Homo sapien
aggatggttgctgataataaagtaggaaagtac

SEQ ID NO: 1056804 - DNA, 33 bp, Homo sapien
aggatggttgctgatagtaaagtaggaaagtac

SEQ ID NO: 1056805 - DNA, 33 bp, Homo sapien
tggactacaagaaattatgaagctatttcaggc

SEQ ID NO: 1056806 - DNA, 33 bp, Homo sapien
tggactacaagaaattttgaagctatttcaggc

SEQ ID NO: 1056807 - DNA, 33 bp, Homo sapien
acattaattttgctcacaaattcgtaatttgag

SEQ ID NO: 1056808 - DNA, 33 bp, Homo sapien
acattaattttgctcagaaattcgtaatttgag

SEQ ID NO: 1056809 - DNA, 33 bp, Homo sapien
atctgtttcactgactaacattacctacgtggc

SEQ ID NO: 1056810 - DNA, 33 bp, Homo sapien
atctgtttcactgacttacattacctacgtggc

SEQ ID NO: 1056811 - DNA, 33 bp, Homo sapien
gcctcagccaatattccagagggaagcataagc

SEQ ID NO: 1056812 - DNA, 33 bp, Homo sapien
gcctcagccaatattctagagggaagcataagc

SEQ ID NO: 1056813 - DNA, 33 bp, Homo sapien
tatattaaaagcgctcaatgttattagtcatga

SEQ ID NO: 1056814 - DNA, 33 bp, Homo sapien
tatattaaaagcgctctatgttattagtcatga

SEQ ID NO: 1056815 - DNA, 33 bp, Homo sapien
tgtaagttcaacttaacgtgttatggaggttat

SEQ ID NO: 1056816 - DNA, 33 bp, Homo sapien
tgtaagttcaacttaatgtgttatggaggttat

SEQ ID NO: 1056817 - DNA, 33 bp, Homo sapien
aaactagtataacctacatggaaagcagcgtgg

SEQ ID NO: 1056818 - DNA, 33 bp, Homo sapien
aaactagtataacctatatggaaagcagcgtgg

SEQ ID NO: 1056819 - DNA, 33 bp, Homo sapien
gaagcatcttgtttacagcttaatatatatgca

SEQ ID NO: 1056820 - DNA, 33 bp, Homo sapien
gaagcatcttgtttacggcttaatatatatgca

SEQ ID NO: 1056821 - DNA, 33 bp, Homo sapien
cagtgcctattttctcaaaggcacttaccctcc

SEQ ID NO: 1056822 - DNA, 33 bp, Homo sapien
cagtgcctattttctcgaaggcacttaccctcc

SEQ ID NO: 1056823 - DNA, 33 bp, Homo sapien
acaccaaaagtgatacaagagagagccgagtga

SEQ ID NO: 1056824 - DNA, 33 bp, Homo sapien
acaccaaaagtgatacgagagagagccgagtga

SEQ ID NO: 1056825 - DNA, 33 bp, Homo sapien
ggagatgacctggaataacataaagaagaagga

SEQ ID NO: 1056826 - DNA, 33 bp, Homo sapien
ggagatgacctggaattacataaagaagaagga

SEQ ID NO: 1056827 - DNA, 33 bp, Homo sapien
actaccaagtcacatacggagtgggaaaatgta

SEQ ID NO: 1056828 - DNA, 33 bp, Homo sapien
actaccaagtcacatatggagtgggaaaatgta

SEQ ID NO: 1056829 - DNA, 33 bp, Homo sapien
gagtaagtgtggaaagcctctggaatagaaaag

SEQ ID NO: 1056830 - DNA, 33 bp, Homo sapien
gagtaagtgtggaaaggctctggaatagaaaag

SEQ ID NO: 1056831 - DNA, 33 bp, Homo sapien
aatggtaaaaggggctaacacagtcatgaatca

SEQ ID NO: 1056832 - DNA, 33 bp, Homo sapien
aatggtaaaaggggctgacacagtcatgaatca

SEQ ID NO: 1056833 - DNA, 33 bp, Homo sapien
gtccatcagattgagtaaaccttgctctggcat

SEQ ID NO: 1056834 - DNA, 33 bp, Homo sapien
gtccatcagattgagtgaaccttgctctggcat

SEQ ID NO: 1056835 - DNA, 33 bp, Homo sapien
gaactgacttacgtcacgtaactatcaagtggc

SEQ ID NO: 1056836 - DNA, 33 bp, Homo sapien
gaactgacttacgtcatgtaactatcaagtggc

SEQ ID NO: 1056837 - DNA, 33 bp, Homo sapien
gaggtgacatttataccgagatctgaatgacag

SEQ ID NO: 1056838 - DNA, 33 bp, Homo sapien
gaggtgacatttatactgagatctgaatgacag

SEQ ID NO: 1056839 - DNA, 33 bp, Homo sapien
ttttgtggcatatctacactagggaatattatt

SEQ ID NO: 1056840 - DNA, 33 bp, Homo sapien
ttttgtggcatatctatactagggaatattatt

SEQ ID NO: 1056841 - DNA, 33 bp, Homo sapien
taaaacatacaaatcaagagaaatgaaggatca

SEQ ID NO: 1056842 - DNA, 33 bp, Homo sapien
taaaacatacaaatcaggagaaatgaaggatca

SEQ ID NO: 1056843 - DNA, 33 bp, Homo sapien
actttttattacagctaaacttattcctgtcct

SEQ ID NO: 1056844 - DNA, 33 bp, Homo sapien
actttttattacagctgaacttattcctgtcct

SEQ ID NO: 1056845 - DNA, 33 bp, Homo sapien
ctgatatcaaatattgaaaaactcccaattctg

SEQ ID NO: 1056846 - DNA, 33 bp, Homo sapien
ctgatatcaaatattgcaaaactcccaattctg

SEQ ID NO: 1056847 - DNA, 33 bp, Homo sapien
ctgctgccgttaaacccgaaaacaatgatgggg

SEQ ID NO: 1056848 - DNA, 33 bp, Homo sapien
ctgctgccgttaaacctgaaaacaatgatgggg

SEQ ID NO: 1056849 - DNA, 33 bp, Homo sapien
tgtagagatgcaagtaagaatggatattatcct

SEQ ID NO: 1056850 - DNA, 33 bp, Homo sapien
tgtagagatgcaagtaggaatggatattatcct

SEQ ID NO: 1056851 - DNA, 33 bp, Homo sapien
cagtagttcagaaataccatctggctgaggttc

SEQ ID NO: 1056852 - DNA, 33 bp, Homo sapien
cagtagttcagaaatatcatctggctgaggttc

SEQ ID NO: 1056853 - DNA, 33 bp, Homo sapien
agtcaccctgaatcccaagtccaatcttgaaat

SEQ ID NO: 1056854 - DNA, 33 bp, Homo sapien
agtcaccctgaatccccagtccaatcttgaaat

SEQ ID NO: 1056855 - DNA, 33 bp, Homo sapien
gcctttcaaagcacaacgaagatgtcctttcac

SEQ ID NO: 1056856 - DNA, 33 bp, Homo sapien
gcctttcaaagcacaaggaagatgtcctttcac

SEQ ID NO: 1056857 - DNA, 33 bp, Homo sapien
ggaaacatgggtaaacacagagtgggaagaaac

SEQ ID NO: 1056858 - DNA, 33 bp, Homo sapien
ggaaacatgggtaaacgcagagtgggaagaaac

SEQ ID NO: 1056859 - DNA, 33 bp, Homo sapien
aggcatgagttcttcaaaccaacccacctcatc

SEQ ID NO: 1056860 - DNA, 33 bp, Homo sapien
aggcatgagttcttcagaccaacccacctcatc

SEQ ID NO: 1056861 - DNA, 33 bp, Homo sapien
tatttgttgaataatgcaattaagtataaggta

SEQ ID NO: 1056862 - DNA, 33 bp, Homo sapien
tatttgttgaataatggaattaagtataaggta

SEQ ID NO: 1056863 - DNA, 33 bp, Homo sapien
tctctcccatgcaatacggtgttcatagtattg

SEQ ID NO: 1056864 - DNA, 33 bp, Homo sapien
tctctcccatgcaatatggtgttcatagtattg

SEQ ID NO: 1056865 - DNA, 33 bp, Homo sapien
tcagtctctgttgtcaacctcatagaagtggtg

SEQ ID NO: 1056866 - DNA, 33 bp, Homo sapien
tcagtctctgttgtcagcctcatagaagtggtg

SEQ ID NO: 1056867 - DNA, 33 bp, Homo sapien
ataacagagcttcagaaggttgttcatgaaagc

SEQ ID NO: 1056868 - DNA, 33 bp, Homo sapien
ataacagagcttcagagggttgttcatgaaagc

SEQ ID NO: 1056869 - DNA, 33 bp, Homo sapien
tgagttgtttatgatccaattatgccagcacgt

SEQ ID NO: 1056870 - DNA, 33 bp, Homo sapien
tgagttgtttatgatctaattatgccagcacgt

SEQ ID NO: 1056871 - DNA, 33 bp, Homo sapien
ttatacaggtttcaaccgagaggcaaagatgca

SEQ ID NO: 1056872 - DNA, 33 bp, Homo sapien
ttatacaggtttcaactgagaggcaaagatgca

SEQ ID NO: 1056873 - DNA, 33 bp, Homo sapien
taaaagatcttcaaaaataatgcctctgtctag

SEQ ID NO: 1056874 - DNA, 33 bp, Homo sapien
taaaagatcttcaaaagtaatgcctctgtctag

SEQ ID NO: 1056875 - DNA, 33 bp, Homo sapien
ttgaatatattcaaaggcttgtcctaatcctgc

SEQ ID NO: 1056876 - DNA, 33 bp, Homo sapien
ttgaatatattcaaagtcttgtcctaatcctgc

SEQ ID NO: 1056877 - DNA, 33 bp, Homo sapien
agcctgttaagtgagaagttagtattttcaatc

SEQ ID NO: 1056878 - DNA, 33 bp, Homo sapien
agcctgttaagtgagaggttagtattttcaatc

SEQ ID NO: 1056879 - DNA, 33 bp, Homo sapien
tctggtcaaaagctaccatctaattgatcagat

SEQ ID NO: 1056880 - DNA, 33 bp, Homo sapien
tctggtcaaaagctactatctaattgatcagat

SEQ ID NO: 1056881 - DNA, 33 bp, Homo sapien
aggcgggtggctgacaccagaagagtaggtgag

SEQ ID NO: 1056882 - DNA, 33 bp, Homo sapien
aggcgggtggctgacatcagaagagtaggtgag

SEQ ID NO: 1056883 - DNA, 33 bp, Homo sapien
taatgtatacatatgtcaaatcgtgagtatttt

SEQ ID NO: 1056884 - DNA, 33 bp, Homo sapien
taatgtatacatatgttaaatcgtgagtatttt

SEQ ID NO: 1056885 - DNA, 33 bp, Homo sapien
atattgatttgataaaagtggctttttggtatg

SEQ ID NO: 1056886 - DNA, 33 bp, Homo sapien
atattgatttgataaaggtggctttttggtatg

SEQ ID NO: 1056887 - DNA, 33 bp, Homo sapien
gtggatttgcaacatgaacaatggctagtaaca

SEQ ID NO: 1056888 - DNA, 33 bp, Homo sapien
gtggatttgcaacatggacaatggctagtaaca

SEQ ID NO: 1056889 - DNA, 33 bp, Homo sapien
ttttggcatttagtaacttaagtctgaataccg

SEQ ID NO: 1056890 - DNA, 33 bp, Homo sapien
ttttggcatttagtaagttaagtctgaataccg

SEQ ID NO: 1056891 - DNA, 33 bp, Homo sapien
tttcatatgcttacacactggagtctttggttg

SEQ ID NO: 1056892 - DNA, 33 bp, Homo sapien
tttcatatgcttacaccctggagtctttggttg

SEQ ID NO: 1056893 - DNA, 33 bp, Homo sapien; identical to SEQ ID NO: 1056891

SEQ ID NO: 1056894 - DNA, 33 bp, Homo sapien; identical to SEQ ID NO: 1056892

SEQ ID NO: 1056895 - DNA, 33 bp, Homo sapien
tgtggccaacacttacacttacatctggacaga

SEQ ID NO: 1056896 - DNA, 33 bp, Homo sapien
tgtggccaacacttacgcttacatctggacaga

SEQ ID NO: 1056897 - DNA, 33 bp, Homo sapien
tctgccaaacacctaaacatttataaggagttt

SEQ ID NO: 1056898 - DNA, 33 bp, Homo sapien
tctgccaaacacctaaccatttataaggagttt

SEQ ID NO: 1056899 - DNA, 33 bp, Homo sapien
atgcagagtccttgaaaagtggtgcgctatgtg

SEQ ID NO: 1056900 - DNA, 33 bp, Homo sapien
atgcagagtccttgaagagtggtgcgctatgtg

SEQ ID NO: 1056901 - DNA, 33 bp, Homo sapien
aaagagaaacttttccacctatacttgtctttg

SEQ ID NO: 1056902 - DNA, 33 bp, Homo sapien
aaagagaaacttttccgcctatacttgtctttg

SEQ ID NO: 1056903 - DNA, 33 bp, Homo sapien
ttgcttccaatagtaactgtaagattccccaac

SEQ ID NO: 1056904 - DNA, 33 bp, Homo sapien
ttgcttccaatagtaagtgtaagattccccaac

SEQ ID NO: 1056905 - DNA, 33 bp, Homo sapien
tttgattaagaccttccatatgacagtccagga

SEQ ID NO: 1056906 - DNA, 33 bp, Homo sapien
tttgattaagaccttctatatgacagtccagga

SEQ ID NO: 1056907 - DNA, 33 bp, Homo sapien
gggtgcctgcctgtaccgagctctgctgaccaa

SEQ ID NO: 1056908 - DNA, 33 bp, Homo sapien
gggtgcctgcctgtactgagctctgctgaccaa

SEQ ID NO: 1056909 - DNA, 33 bp, Homo sapien
gatttctcaaacaccaacttgtagtctctgatg

SEQ ID NO: 1056910 - DNA, 33 bp, Homo sapien
gatttctcaaacaccatcttgtagtctctgatg

SEQ ID NO: 1056911 - DNA, 33 bp, Homo sapien
gcctctgtgctaaagaagatctaaggtttgttg

SEQ ID NO: 1056912 - DNA, 33 bp, Homo sapien
gcctctgtgctaaagaggatctaaggtttgttg

SEQ ID NO: 1056913 - DNA, 33 bp, Homo sapien
aatctatcaaattgtacggttatgatttgtgca

SEQ ID NO: 1056914 - DNA, 33 bp, Homo sapien
aatctatcaaattgtatggttatgatttgtgca

SEQ ID NO: 1056915 - DNA, 33 bp, Homo sapien
ctcaatattttaggaacgcatgtttacaatttt

SEQ ID NO: 1056916 - DNA, 33 bp, Homo sapien
ctcaatattttaggaatgcatgtttacaatttt

SEQ ID NO: 1056917 - DNA, 33 bp, Homo sapien
ggcaagggcatactctcagactgagctcacttc

SEQ ID NO: 1056918 - DNA, 33 bp, Homo sapien
ggcaagggcatactctgagactgagctcacttc

SEQ ID NO: 1056919 - DNA, 33 bp, Homo sapien
actcccctatgtagacccaatcacaagcaagtg

SEQ ID NO: 1056920 - DNA, 33 bp, Homo sapien
actcccctatgtagactcaatcacaagcaagtg

SEQ ID NO: 1056921 - DNA, 33 bp, Homo sapien
atgcaaatagtcactaagagaccagtgtgtgcc

SEQ ID NO: 1056922 - DNA, 33 bp, Homo sapien
atgcaaatagtcactaggagaccagtgtgtgcc

SEQ ID NO: 1056923 - DNA, 33 bp, Homo sapien
agtataaagaacatgaagtatcctgttgatgaa

SEQ ID NO: 1056924 - DNA, 33 bp, Homo sapien
agtataaagaacatgaggtatcctgttgatgaa

SEQ ID NO: 1056925 - DNA, 33 bp, Homo sapien
cctttatagcatgagacagatttttcttaccac

SEQ ID NO: 1056926 - DNA, 33 bp, Homo sapien
cctttatagcatgagatagatttttcttaccac

SEQ ID NO: 1056927 - DNA, 33 bp, Homo sapien
aaatatcttctgggcacctaagcactttagaca

SEQ ID NO: 1056928 - DNA, 33 bp, Homo sapien
aaatatcttctgggcatctaagcactttagaca

SEQ ID NO: 1056929 - DNA, 33 bp, Homo sapien
gacctcttgtagttgcaaagtttaatgcttgca

SEQ ID NO: 1056930 - DNA, 33 bp, Homo sapien
gacctcttgtagttgcgaagtttaatgcttgca

SEQ ID NO: 1056931 - DNA, 33 bp, Homo sapien
cagttgaatttgcctaagtgggtaggatgccat

SEQ ID NO: 1056932 - DNA, 33 bp, Homo sapien
cagttgaatttgcctaggtgggtaggatgccat

SEQ ID NO: 1056933 - DNA, 33 bp, Homo sapien
tcctgctggttaatgaactgagcaaagaggtta

SEQ ID NO: 1056934 - DNA, 33 bp, Homo sapien
tcctgctggttaatgagctgagcaaagaggtta

SEQ ID NO: 1056935 - DNA, 33 bp, Homo sapien
ccttgataggtgttcactcatttcatactgaca

SEQ ID NO: 1056936 - DNA, 33 bp, Homo sapien
ccttgataggtgttcattcatttcatactgaca

SEQ ID NO: 1056937 - DNA, 33 bp, Homo sapien
gaaggtggttgcaaaacaaggagtgtgggggaa

SEQ ID NO: 1056938 - DNA, 33 bp, Homo sapien
gaaggtggttgcaaaataaggagtgtgggggaa

SEQ ID NO: 1056939 - DNA, 33 bp, Homo sapien
aaaagcttgagaatcactgaggttctttgacat

SEQ ID NO: 1056940 - DNA, 33 bp, Homo sapien
aaaagcttgagaatcattgaggttctttgacat

SEQ ID NO: 1056941 - DNA, 33 bp, Homo sapien
tgtcctggctcctgcaccactggatctgaccca

SEQ ID NO: 1056942 - DNA, 33 bp, Homo sapien
tgtcctggctcctgcatcactggatctgaccca

SEQ ID NO: 1056943 - DNA, 33 bp, Homo sapien
tccattcctgtcctaaggcaattcacttgaatt

SEQ ID NO: 1056944 - DNA, 33 bp, Homo sapien
tccattcctgtcctaatgcaattcacttgaatt

SEQ ID NO: 1056945 - DNA, 33 bp, Homo sapien
ggatggattataattacggttcaaaatcataga

SEQ ID NO: 1056946 - DNA, 33 bp, Homo sapien
ggatggattataattatggttcaaaatcataga

SEQ ID NO: 1056947 - DNA, 33 bp, Homo sapien
atggagaactaaggagacctatgaaccctgcga

SEQ ID NO: 1056948 - DNA, 33 bp, Homo sapien
atggagaactaaggagtcctatgaaccctgcga

SEQ ID NO: 1056949 - DNA, 33 bp, Homo sapien
gtaagatcaaaagccacagtggttatatttgta

SEQ ID NO: 1056950 - DNA, 33 bp, Homo sapien
gtaagatcaaaagccatagtggttatatttgta

SEQ ID NO: 1056951 - DNA, 33 bp, Homo sapien
tagtgtgaattgatcaagcaatccatagagcca

SEQ ID NO: 1056952 - DNA, 33 bp, Homo sapien
tagtgtgaattgatcaggcaatccatagagcca

SEQ ID NO: 1056953 - DNA, 33 bp, Homo sapien
ggaaaccaactagaaggctcttccaggcatcca

SEQ ID NO: 1056954 - DNA, 33 bp, Homo sapien
ggaaaccaactagaagtctcttccaggcatcca

SEQ ID NO: 1056955 - DNA, 33 bp, Homo sapien
atttaatgactatttgcaacagtatggaggaga

SEQ ID NO: 1056956 - DNA, 33 bp, Homo sapien
atttaatgactatttggaacagtatggaggaga

SEQ ID NO: 1056957 - DNA, 33 bp, Homo sapien
tctggaggttattaacaataccagttcctagac

SEQ ID NO: 1056958 - DNA, 33 bp, Homo sapien
tctggaggttattaacgataccagttcctagac

SEQ ID NO: 1056959 - DNA, 33 bp, Homo sapien
gcaccgctgggtcataaagcatctgcatattaa

SEQ ID NO: 1056960 - DNA, 33 bp, Homo sapien
gcaccgctgggtcatagagcatctgcatattaa

SEQ ID NO: 1056961 - DNA, 33 bp, Homo sapien
tggacctgaacaggaaaagacggtgccaggata

SEQ ID NO: 1056962 - DNA, 33 bp, Homo sapien
tggacctgaacaggaagagacggtgccaggata

SEQ ID NO: 1056963 - DNA, 33 bp, Homo sapien
ttttcttgcatactcactaagacttacatttgt

SEQ ID NO: 1056964 - DNA, 33 bp, Homo sapien
ttttcttgcatactcagtaagacttacatttgt

SEQ ID NO: 1056965 - DNA, 33 bp, Homo sapien
atttgaaacttgaaagacagttgagatactgat

SEQ ID NO: 1056966 - DNA, 33 bp, Homo sapien
atttgaaacttgaaaggcagttgagatactgat

SEQ ID NO: 1056967 - DNA, 33 bp, Homo sapien
cagctaatgtgatagacagaatgttccaggata

SEQ ID NO: 1056968 - DNA, 33 bp, Homo sapien
cagctaatgtgatagatagaatgttccaggata

SEQ ID NO: 1056969 - DNA, 33 bp, Homo sapien
atgatttcagataggaacaatcaaatttaccac

SEQ ID NO: 1056970 - DNA, 33 bp, Homo sapien
atgatttcagataggagcaatcaaatttaccac

SEQ ID NO: 1056971 - DNA, 33 bp, Homo sapien
atcagaaaacatgaccaaactctgaatccacga

SEQ ID NO: 1056972 - DNA, 33 bp, Homo sapien
atcagaaaacatgaccgaactctgaatccacga

SEQ ID NO: 1056973 - DNA, 33 bp, Homo sapien
ccccacgcaactctaacaggaaagaggactttg

SEQ ID NO: 1056974 - DNA, 33 bp, Homo sapien
ccccacgcaactctaagaggaaagaggactttg

SEQ ID NO: 1056975 - DNA, 33 bp, Homo sapien
aaagcactgcattagacgttggcaatgaaagta

SEQ ID NO: 1056976 - DNA, 33 bp, Homo sapien
aaagcactgcattagatgttggcaatgaaagta

SEQ ID NO: 1056977 - DNA, 33 bp, Homo sapien
gccttgaagaagcaagccctcatgaaccctaca

SEQ ID NO: 1056978 - DNA, 33 bp, Homo sapien
gccttgaagaagcaagtcctcatgaaccctaca

SEQ ID NO: 1056979 - DNA, 33 bp, Homo sapien
aatccatgactgctcccgagacctcctgactgt

SEQ ID NO: 1056980 - DNA, 33 bp, Homo sapien
aatccatgactgctcctgagacctcctgactgt

SEQ ID NO: 1056981 - DNA, 33 bp, Homo sapien
acattccaatgaaagcaaactgactctctcaca

SEQ ID NO: 1056982 - DNA, 33 bp, Homo sapien
acattccaatgaaagcgaactgactctctcaca

SEQ ID NO: 1056983 - DNA, 33 bp, Homo sapien
tacctcttgaaaggtggaaaatcatattttgct

SEQ ID NO: 1056984 - DNA, 33 bp, Homo sapien
tacctcttgaaaggtgtaaaatcatattttgct

SEQ ID NO: 1056985 - DNA, 33 bp, Homo sapien
aactccaaaggctctacgtaccagggctcccct

SEQ ID NO: 1056986 - DNA, 33 bp, Homo sapien
aactccaaaggctctatgtaccagggctcccct

SEQ ID NO: 1056987 - DNA, 33 bp, Homo sapien
gactggtcaaaattcccgactgcaatgtcctgg

SEQ ID NO: 1056988 - DNA, 33 bp, Homo sapien
gactggtcaaaattcctgactgcaatgtcctgg

SEQ ID NO: 1056989 - DNA, 33 bp, Homo sapien
cgttgtcactttcctccaaaaagctcagaggca

SEQ ID NO: 1056990 - DNA, 33 bp, Homo sapien
cgttgtcactttcctctaaaaagctcagaggca

SEQ ID NO: 1056991 - DNA, 33 bp, Homo sapien
tacccccaaatcattccgaagcaggtttttaaa

SEQ ID NO: 1056992 - DNA, 33 bp, Homo sapien
tacccccaaatcattctgaagcaggtttttaaa

SEQ ID NO: 1056993 - DNA, 33 bp, Homo sapien
tgtcataatgttgtgccgacttgctgggtaagc

SEQ ID NO: 1056994 - DNA, 33 bp, Homo sapien
tgtcataatgttgtgctgacttgctgggtaagc

SEQ ID NO: 1056995 - DNA, 33 bp, Homo sapien
atcatacacaacaacaaaagtctgaatggctat

SEQ ID NO: 1056996 - DNA, 33 bp, Homo sapien
atcatacacaacaacacaagtctgaatggctat

SEQ ID NO: 1056997 - DNA, 33 bp, Homo sapien
aaaccagtgaaaaaaaccaagaaataaatctgg

SEQ ID NO: 1056998 - DNA, 33 bp, Homo sapien
aaaccagtgaaaaaaagcaagaaataaatctgg

SEQ ID NO: 1056999 - DNA, 33 bp, Homo sapien
ttgtctggcctattaaatatttgacctgcttcc

SEQ ID NO: 1057000 - DNA, 33 bp, Homo sapien
ttgtctggcctattaactatttgacctgcttcc

SEQ ID NO: 1057001 - DNA, 33 bp, Homo sapien
gtggaactttccaggaaccaagggataaaaagc

SEQ ID NO: 1057002 - DNA, 33 bp, Homo sapien
gtggaactttccaggacccaagggataaaaagc

SEQ ID NO: 1057003 - DNA, 33 bp, Homo sapien
tcctggactaatgcccgattgaatgtcgggctt

SEQ ID NO: 1057004 - DNA, 33 bp, Homo sapien
tcctggactaatgccctattgaatgtcgggctt

SEQ ID NO: 1057005 - DNA, 33 bp, Homo sapien
aaaatagttgatgtgacagaagtagagagtaga

SEQ ID NO: 1057006 - DNA, 33 bp, Homo sapien
aaaatagttgatgtgatagaagtagagagtaga

SEQ ID NO: 1057007 - DNA, 33 bp, Homo sapien
ggggctgagctgactacgaaatctacccttgtt

SEQ ID NO: 1057008 - DNA, 33 bp, Homo sapien
ggggctgagctgactatgaaatctacccttgtt

SEQ ID NO: 1057009 - DNA, 33 bp, Homo sapien
ctctgagcatgaacacagtgtcctagttatcta

SEQ ID NO: 1057010 - DNA, 33 bp, Homo sapien
ctctgagcatgaacacggtgtcctagttatcta

SEQ ID NO: 1057011 - DNA, 33 bp, Homo sapien
tttctgggcagattaaacttatgctcttggctt

SEQ ID NO: 1057012 - DNA, 33 bp, Homo sapien
tttctgggcagattaaccttatgctcttggctt

SEQ ID NO: 1057013 - DNA, 33 bp, Homo sapien
tctcctatatgccaataaaaaaatttacacaca

SEQ ID NO: 1057014 - DNA, 33 bp, Homo sapien
tctcctatatgccaattaaaaaatttacacaca

SEQ ID NO: 1057015 - DNA, 33 bp, Homo sapien
agctacgagggcttaaatgacacctgccaacat

SEQ ID NO: 1057016 - DNA, 33 bp, Homo sapien
agctacgagggcttaagtgacacctgccaacat

SEQ ID NO: 1057017 - DNA, 33 bp, Homo sapien
aattcagtgatgtgaaaaagcaggagaaattat

SEQ ID NO: 1057018 - DNA, 33 bp, Homo sapien
aattcagtgatgtgaagaagcaggagaaattat

SEQ ID NO: 1057019 - DNA, 33 bp, Homo sapien
acacagcattcaagtgcagctagtttatttggg

SEQ ID NO: 1057020 - DNA, 33 bp, Homo sapien
acacagcattcaagtgtagctagtttatttggg

SEQ ID NO: 1057021 - DNA, 33 bp, Homo sapien
actgtacagtaacaaggcaccctctcaactcct

SEQ ID NO: 1057022 - DNA, 33 bp, Homo sapien
actgtacagtaacaagtcaccctctcaactcct

SEQ ID NO: 1057023 - DNA, 33 bp, Homo sapien
taaccttgtctgtatcaagagttacatgtgctt

SEQ ID NO: 1057024 - DNA, 33 bp, Homo sapien
taaccttgtctgtatcgagagttacatgtgctt

SEQ ID NO: 1057025 - DNA, 33 bp, Homo sapien
acactcagggttggggacaactgtgagaagcaa

SEQ ID NO: 1057026 - DNA, 33 bp, Homo sapien
acactcagggttggggtcaactgtgagaagcaa

SEQ ID NO: 1057027 - DNA, 33 bp, Homo sapien
ctaatctggcctttggcaagaagcattacaaag

SEQ ID NO: 1057028 - DNA, 33 bp, Homo sapien
ctaatctggcctttggtaagaagcattacaaag

SEQ ID NO: 1057029 - DNA, 33 bp, Homo sapien
acttcgtgccattttacaaggatatcaagagtt

SEQ ID NO: 1057030 - DNA, 33 bp, Homo sapien
acttcgtgccattttagaaggatatcaagagtt

SEQ ID NO: 1057031 - DNA, 33 bp, Homo sapien
tattctgggtatatgcaatgagtttgtcttgag

SEQ ID NO: 1057032 - DNA, 33 bp, Homo sapien
tattctgggtatatgcgatgagtttgtcttgag

SEQ ID NO: 1057033 - DNA, 33 bp, Homo sapien
tgaaaaaaagtgggtaactgcaaagcctgatgg

SEQ ID NO: 1057034 - DNA, 33 bp, Homo sapien
tgaaaaaaagtgggtacctgcaaagcctgatgg

SEQ ID NO: 1057035 - DNA, 33 bp, Homo sapien
cacctctcaatgggagaagggtcaaggacacct

SEQ ID NO: 1057036 - DNA, 33 bp, Homo sapien
cacctctcaatgggaggagggtcaaggacacct

SEQ ID NO: 1057037 - DNA, 33 bp, Homo sapien
accagccaaaatcctgcagcatatctctcagca

SEQ ID NO: 1057038 - DNA, 33 bp, Homo sapien
accagccaaaatcctgtagcatatctctcagca

SEQ ID NO: 1057039 - DNA, 33 bp, Homo sapien
taaggtccttggagaactgcctcagcctggttc

SEQ ID NO: 1057040 - DNA, 33 bp, Homo sapien
taaggtccttggagaattgcctcagcctggttc

SEQ ID NO: 1057041 - DNA, 33 bp, Homo sapien
tgctgtgaagtgcttaagataccatatctaacg

SEQ ID NO: 1057042 - DNA, 33 bp, Homo sapien
tgctgtgaagtgcttatgataccatatctaacg

SEQ ID NO: 1057043 - DNA, 33 bp, Homo sapien
atcacagcttagtatccctgcttttctttttct

SEQ ID NO: 1057044 - DNA, 33 bp, Homo sapien
atcacagcttagtatctctgcttttctttttct

SEQ ID NO: 1057045 - DNA, 33 bp, Homo sapien
ggctgtgtgccctagacggtggtatggggaaag

SEQ ID NO: 1057046 - DNA, 33 bp, Homo sapien
ggctgtgtgccctagatggtggtatggggaaag

SEQ ID NO: 1057047 - DNA, 33 bp, Homo sapien
tttttaggtaaagggacctcatagtttcttcgg

SEQ ID NO: 1057048 - DNA, 33 bp, Homo sapien
tttttaggtaaagggagctcatagtttcttcgg

SEQ ID NO: 1057049 - DNA, 33 bp, Homo sapien
gctcttcaaaattcacaataaaccttctcctca

SEQ ID NO: 1057050 - DNA, 33 bp, Homo sapien
gctcttcaaaattcacgataaaccttctcctca

SEQ ID NO: 1057051 - DNA, 33 bp, Homo sapien
cagagtcttctaaatacatgggatttcaaagga

SEQ ID NO: 1057052 - DNA, 33 bp, Homo sapien
cagagtcttctaaatatatgggatttcaaagga

SEQ ID NO: 1057053 - DNA, 33 bp, Homo sapien
ttgttggtgcgaatgaacagtttgtgtactccc

SEQ ID NO: 1057054 - DNA, 33 bp, Homo sapien
ttgttggtgcgaatgagcagtttgtgtactccc

SEQ ID NO: 1057055 - DNA, 33 bp, Homo sapien
atgagctgcaattgtcaaatatggtttttaagt

SEQ ID NO: 1057056 - DNA, 33 bp, Homo sapien
atgagctgcaattgtcgaatatggtttttaagt

SEQ ID NO: 1057057 - DNA, 33 bp, Homo sapien
tcttctttcatttcccaaaaaattcagaacctt

SEQ ID NO: 1057058 - DNA, 33 bp, Homo sapien
tcttctttcatttcccgaaaaattcagaacctt

SEQ ID NO: 1057059 - DNA, 33 bp, Homo sapien
aggaatcttctggagaacttgttaacaggtaga

SEQ ID NO: 1057060 - DNA, 33 bp, Homo sapien
aggaatcttctggagatcttgttaacaggtaga

SEQ ID NO: 1057061 - DNA, 33 bp, Homo sapien
gtaagagagagagataatagcaggttcctgctg

SEQ ID NO: 1057062 - DNA, 33 bp, Homo sapien
gtaagagagagagatagtagcaggttcctgctg

SEQ ID NO: 1057063 - DNA, 33 bp, Homo sapien
cattttataggtaagtcaatatgaaagtgactt

SEQ ID NO: 1057064 - DNA, 33 bp, Homo sapien
cattttataggtaagttaatatgaaagtgactt

SEQ ID NO: 1057065 - DNA, 33 bp, Homo sapien
gctcagagcactgttaacaaaaggggggttggc

SEQ ID NO: 1057066 - DNA, 33 bp, Homo sapien
gctcagagcactgttagcaaaaggggggttggc

SEQ ID NO: 1057067 - DNA, 33 bp, Homo sapien
aatggggtttatagccaattctgcacctcaccc

SEQ ID NO: 1057068 - DNA, 33 bp, Homo sapien
aatggggtttatagccgattctgcacctcaccc

SEQ ID NO: 1057069 - DNA, 33 bp, Homo sapien
gcctcgggggtaagcacgatcctgacttctaca

SEQ ID NO: 1057070 - DNA, 33 bp, Homo sapien
gcctcgggggtaagcatgatcctgacttctaca

SEQ ID NO: 1057071 - DNA, 33 bp, Homo sapien
cagaggtccagaagaagtgactttattgagtac

SEQ ID NO: 1057072 - DNA, 33 bp, Homo sapien
cagaggtccagaagaattgactttattgagtac

SEQ ID NO: 1057073 - DNA, 33 bp, Homo sapien
actccagcttcatttacggagaaatatacttct

SEQ ID NO: 1057074 - DNA, 33 bp, Homo sapien
actccagcttcatttatggagaaatatacttct

SEQ ID NO: 1057075 - DNA, 33 bp, Homo sapien
ccccagaaaaagtcaaaccaatgagcaaactgt

SEQ ID NO: 1057076 - DNA, 33 bp, Homo sapien
ccccagaaaaagtcaagccaatgagcaaactgt

SEQ ID NO: 1057077 - DNA, 33 bp, Homo sapien
ggcatgtgtggcacaaaagtgacaaattgtgac

SEQ ID NO: 1057078 - DNA, 33 bp, Homo sapien
ggcatgtgtggcacaacagtgacaaattgtgac

SEQ ID NO: 1057079 - DNA, 33 bp, Homo sapien
tgctggagcacaaccaagtggctaaggagtgct

SEQ ID NO: 1057080 - DNA, 33 bp, Homo sapien
tgctggagcacaaccaggtggctaaggagtgct

SEQ ID NO: 1057081 - DNA, 33 bp, Homo sapien
aagctgtataactcaaatctttgatcttcacca

SEQ ID NO: 1057082 - DNA, 33 bp, Homo sapien
aagctgtataactcaagtctttgatcttcacca

SEQ ID NO: 1057083 - DNA, 33 bp, Homo sapien
tgccctggcagactcacggtatcctgtgtatta

SEQ ID NO: 1057084 - DNA, 33 bp, Homo sapien
tgccctggcagactcatggtatcctgtgtatta

SEQ ID NO: 1057085 - DNA, 33 bp, Homo sapien
tccagctccgcacaaactgggtaaagtggctct

SEQ ID NO: 1057086 - DNA, 33 bp, Homo sapien
tccagctccgcacaaagtgggtaaagtggctct

SEQ ID NO: 1057087 - DNA, 33 bp, Homo sapien
tccagttaggttcacacagtacaaagccatcaa

SEQ ID NO: 1057088 - DNA, 33 bp, Homo sapien
tccagttaggttcacagagtacaaagccatcaa

SEQ ID NO: 1057089 - DNA, 33 bp, Homo sapien
gacttagagaaggcaactgataagccaaacgac

SEQ ID NO: 1057090 - DNA, 33 bp, Homo sapien
gacttagagaaggcaattgataagccaaacgac

SEQ ID NO: 1057091 - DNA, 33 bp, Homo sapien
acttgagcttattggaaacaaagctgaccactg

SEQ ID NO: 1057092 - DNA, 33 bp, Homo sapien
acttgagcttattggagacaaagctgaccactg

SEQ ID NO: 1057093 - DNA, 33 bp, Homo sapien
tgtttctccatattccaatggctgtaattgcat

SEQ ID NO: 1057094 - DNA, 33 bp, Homo sapien
tgtttctccatattccgatggctgtaattgcat

SEQ ID NO: 1057095 - DNA, 33 bp, Homo sapien
caaggtcttgtacatcacattgccagatgacat

SEQ ID NO: 1057096 - DNA, 33 bp, Homo sapien
caaggtcttgtacatctcattgccagatgacat

SEQ ID NO: 1057097 - DNA, 33 bp, Homo sapien
acaaagtgtgctgcgagaaaacatctgtggctg

SEQ ID NO: 1057098 - DNA, 33 bp, Homo sapien
acaaagtgtgctgcgataaaacatctgtggctg

SEQ ID NO: 1057099 - DNA, 33 bp, Homo sapien
tttgtctatctttgaaccttatgtaaatggaat

SEQ ID NO: 1057100 - DNA, 33 bp, Homo sapien
tttgtctatctttgaatcttatgtaaatggaat

SEQ ID NO: 1057101 - DNA, 33 bp, Homo sapien
atggtatgactgctaaaagatgcgggaagacag

SEQ ID NO: 1057102 - DNA, 33 bp, Homo sapien
atggtatgactgctaagagatgcgggaagacag

SEQ ID NO: 1057103 - DNA, 33 bp, Homo sapien
agtgaagaatgtgataagagatgacatcacaga

SEQ ID NO: 1057104 - DNA, 33 bp, Homo sapien
agtgaagaatgtgataggagatgacatcacaga

SEQ ID NO: 1057105 - DNA, 33 bp, Homo sapien
attgtatggataggccacattttgcttagcatt

SEQ ID NO: 1057106 - DNA, 33 bp, Homo sapien
attgtatggataggcctcattttgcttagcatt

SEQ ID NO: 1057107 - DNA, 33 bp, Homo sapien
cagagtttagtgaaacaaagatgtaaatgtctc

SEQ ID NO: 1057108 - DNA, 33 bp, Homo sapien
cagagtttagtgaaacgaagatgtaaatgtctc

SEQ ID NO: 1057109 - DNA, 33 bp, Homo sapien
tggttgctctttgttggaattctaaatagtggc

SEQ ID NO: 1057110 - DNA, 33 bp, Homo sapien
tggttgctctttgttgtaattctaaatagtggc

SEQ ID NO: 1057111 - DNA, 33 bp, Homo sapien
aaacagaaggcgatgacggcatttgaaaaaaac

SEQ ID NO: 1057112 - DNA, 33 bp, Homo sapien
aaacagaaggcgatgatggcatttgaaaaaaac

SEQ ID NO: 1057113 - DNA, 33 bp, Homo sapien
ggtcattaggttgggcccgaattcactatgagt

SEQ ID NO: 1057114 - DNA, 33 bp, Homo sapien
ggtcattaggttgggctcgaattcactatgagt

SEQ ID NO: 1057115 - DNA, 33 bp, Homo sapien
tctgtctgctctagaacttcatgtaaattcaat

SEQ ID NO: 1057116 - DNA, 33 bp, Homo sapien
tctgtctgctctagaagttcatgtaaattcaat

SEQ ID NO: 1057117 - DNA, 33 bp, Homo sapien
tgcgactctgtgaagacgtgctttccgccatga

SEQ ID NO: 1057118 - DNA, 33 bp, Homo sapien
tgcgactctgtgaagaggtgctttccgccatga

SEQ ID NO: 1057119 - DNA, 33 bp, Homo sapien
tgctgagtacagccaaatagcagattcatgaac

SEQ ID NO: 1057120 - DNA, 33 bp, Homo sapien
tgctgagtacagccaagtagcagattcatgaac

SEQ ID NO: 1057121 - DNA, 33 bp, Homo sapien
ggaaactgtagctaaacaagtaagtgacagatg

SEQ ID NO: 1057122 - DNA, 33 bp, Homo sapien
ggaaactgtagctaaagaagtaagtgacagatg

SEQ ID NO: 1057123 - DNA, 33 bp, Homo sapien
tatcaagatcaggaaactaacattgcgataatg

SEQ ID NO: 1057124 - DNA, 33 bp, Homo sapien
tatcaagatcaggaaattaacattgcgataatg

SEQ ID NO: 1057125 - DNA, 33 bp, Homo sapien
tcgagcataataaaaccgttgttaagctgctaa

SEQ ID NO: 1057126 - DNA, 33 bp, Homo sapien
tcgagcataataaaacggttgttaagctgctaa

SEQ ID NO: 1057127 - DNA, 33 bp, Homo sapien
aatgtggattttaagacggtaactcctaaaatg

SEQ ID NO: 1057128 - DNA, 33 bp, Homo sapien
aatgtggattttaagatggtaactcctaaaatg

SEQ ID NO: 1057129 - DNA, 33 bp, Homo sapien
gtgccccagtctaaagaaacccgcactgactac

SEQ ID NO: 1057130 - DNA, 33 bp, Homo sapien
gtgccccagtctaaagtaacccgcactgactac

SEQ ID NO: 1057131 - DNA, 33 bp, Homo sapien
tgcactatcttcttaccgacagcccccaggtga

SEQ ID NO: 1057132 - DNA, 33 bp, Homo sapien
tgcactatcttcttactgacagcccccaggtga

SEQ ID NO: 1057133 - DNA, 33 bp, Homo sapien
ttattagagtgctgtcaaattttgagtacctgc

SEQ ID NO: 1057134 - DNA, 33 bp, Homo sapien
ttattagagtgctgtctaattttgagtacctgc

SEQ ID NO: 1057135 - DNA, 33 bp, Homo sapien
cctgggtcttctcacaagtctttggttggctta

SEQ ID NO: 1057136 - DNA, 33 bp, Homo sapien
cctgggtcttctcacaggtctttggttggctta

SEQ ID NO: 1057137 - DNA, 33 bp, Homo sapien
acttcatctgtttccccagcttatcaatttgtt

SEQ ID NO: 1057138 - DNA, 33 bp, Homo sapien
acttcatctgtttccctagcttatcaatttgtt

SEQ ID NO: 1057139 - DNA, 33 bp, Homo sapien
cctctctctcaggaaccggtcagcacttacagc

SEQ ID NO: 1057140 - DNA, 33 bp, Homo sapien
cctctctctcaggaactggtcagcacttacagc

SEQ ID NO: 1057141 - DNA, 33 bp, Homo sapien
ccttgtgatgaattaccggccaagggaatataa

SEQ ID NO: 1057142 - DNA, 33 bp, Homo sapien
ccttgtgatgaattactggccaagggaatataa

SEQ ID NO: 1057143 - DNA, 33 bp, Homo sapien
tggcccgtttggaagcactcaggctgggattca

SEQ ID NO: 1057144 - DNA, 33 bp, Homo sapien
tggcccgtttggaagcgctcaggctgggattca

SEQ ID NO: 1057145 - DNA, 33 bp, Homo sapien
attcatgaggacaaaaaccatatgttgaggatg

SEQ ID NO: 1057146 - DNA, 33 bp, Homo sapien
attcatgaggacaaaagccatatgttgaggatg

SEQ ID NO: 1057147 - DNA, 33 bp, Homo sapien
gggaaaagagggttccaagagcaaatcggtttg

SEQ ID NO: 1057148 - DNA, 33 bp, Homo sapien
gggaaaagagggttccgagagcaaatcggtttg

SEQ ID NO: 1057149 - DNA, 33 bp, Homo sapien
aaatggccttcccaacaaagtcagggacaagct

SEQ ID NO: 1057150 - DNA, 33 bp, Homo sapien
aaatggccttcccaaccaagtcagggacaagct

SEQ ID NO: 1057151 - DNA, 33 bp, Homo sapien
ataggacttttatgtcacataaccaaccctagt

SEQ ID NO: 1057152 - DNA, 33 bp, Homo sapien
ataggacttttatgtctcataaccaaccctagt

SEQ ID NO: 1057153 - DNA, 33 bp, Homo sapien
ccccagaagaaactaaccctagcatcaccttga

SEQ ID NO: 1057154 - DNA, 33 bp, Homo sapien
ccccagaagaaactaatcctagcatcaccttga

SEQ ID NO: 1057155 - DNA, 33 bp, Homo sapien
gactcctctctttcacaagttggtagtttattt

SEQ ID NO: 1057156 - DNA, 33 bp, Homo sapien
gactcctctctttcacgagttggtagtttattt

SEQ ID NO: 1057157 - DNA, 33 bp, Homo sapien
gcccactctatgttcacggtgagctctattacc

SEQ ID NO: 1057158 - DNA, 33 bp, Homo sapien
gcccactctatgttcatggtgagctctattacc

SEQ ID NO: 1057159 - DNA, 33 bp, Homo sapien
ttccccctttgcagaacgtgttccgcatcaaca

SEQ ID NO: 1057160 - DNA, 33 bp, Homo sapien
ttccccctttgcagaatgtgttccgcatcaaca

SEQ ID NO: 1057161 - DNA, 33 bp, Homo sapien
ttttaattgctctttgcaggttgagccgtttct

SEQ ID NO: 1057162 - DNA, 33 bp, Homo sapien
ttttaattgctctttggaggttgagccgtttct

SEQ ID NO: 1057163 - DNA, 33 bp, Homo sapien
attccacataatagaactgaattcataacgcct

SEQ ID NO: 1057164 - DNA, 33 bp, Homo sapien
attccacataatagaagtgaattcataacgcct

SEQ ID NO: 1057165 - DNA, 33 bp, Homo sapien
ttgctcttgaaggagtaaagagaggatttggac

SEQ ID NO: 1057166 - DNA, 33 bp, Homo sapien
ttgctcttgaaggagtgaagagaggatttggac

SEQ ID NO: 1057167 - DNA, 33 bp, Homo sapien
ccctgattgccaactaaaagtttcctaaccaag

SEQ ID NO: 1057168 - DNA, 33 bp, Homo sapien
ccctgattgccaactacaagtttcctaaccaag

SEQ ID NO: 1057169 - DNA, 33 bp, Homo sapien
aatagcctagtgagaccctaaatgccagggtgt

SEQ ID NO: 1057170 - DNA, 33 bp, Homo sapien
aatagcctagtgagactctaaatgccagggtgt

SEQ ID NO: 1057171 - DNA, 33 bp, Homo sapien
aatcatggagcactctaaacatctgtctatcaa

SEQ ID NO: 1057172 - DNA, 33 bp, Homo sapien
aatcatggagcactcttaacatctgtctatcaa

SEQ ID NO: 1057173 - DNA, 33 bp, Homo sapien
tttggtgttatttcaacttcaaataaatcgctg

SEQ ID NO: 1057174 - DNA, 33 bp, Homo sapien
tttggtgttatttcaatttcaaataaatcgctg

SEQ ID NO: 1057175 - DNA, 33 bp, Homo sapien
cctaagcaaactaagacagctatcacaatctcc

SEQ ID NO: 1057176 - DNA, 33 bp, Homo sapien
cctaagcaaactaagagagctatcacaatctcc

SEQ ID NO: 1057177 - DNA, 33 bp, Homo sapien
gtttgtcttctgaccaactctaatctggagcca

SEQ ID NO: 1057178 - DNA, 33 bp, Homo sapien
gtttgtcttctgaccagctctaatctggagcca

SEQ ID NO: 1057179 - DNA, 33 bp, Homo sapien
caggcagtttcttccaatctgtcatttattgta

SEQ ID NO: 1057180 - DNA, 33 bp, Homo sapien
caggcagtttcttccagtctgtcatttattgta

SEQ ID NO: 1057181 - DNA, 33 bp, Homo sapien
caataagcacttacacaggaatgcctactcttt

SEQ ID NO: 1057182 - DNA, 33 bp, Homo sapien
caataagcacttacacgggaatgcctactcttt

SEQ ID NO: 1057183 - DNA, 33 bp, Homo sapien
catcacagagaacataccagacttgatctggtg

SEQ ID NO: 1057184 - DNA, 33 bp, Homo sapien
catcacagagaacatatcagacttgatctggtg

SEQ ID NO: 1057185 - DNA, 33 bp, Homo sapien
cagaaagaaaacctccacatagcaaatgacaaa

SEQ ID NO: 1057186 - DNA, 33 bp, Homo sapien
cagaaagaaaacctccgcatagcaaatgacaaa

SEQ ID NO: 1057187 - DNA, 33 bp, Homo sapien
taccttgaacttatcaaacagccgaagtcacag

SEQ ID NO: 1057188 - DNA, 33 bp, Homo sapien
taccttgaacttatcagacagccgaagtcacag

SEQ ID NO: 1057189 - DNA, 33 bp, Homo sapien
ttagtgaaaaatctaaaacccagaatgagatat

SEQ ID NO: 1057190 - DNA, 33 bp, Homo sapien
ttagtgaaaaatctaacacccagaatgagatat

SEQ ID NO: 1057191 - DNA, 33 bp, Homo sapien
cagtcctgcagcattacagtcccacccttgtga

SEQ ID NO: 1057192 - DNA, 33 bp, Homo sapien
cagtcctgcagcattagagtcccacccttgtga

SEQ ID NO: 1057193 - DNA, 33 bp, Homo sapien
aactgagtgatccacagatttacactatgggtt

SEQ ID NO: 1057194 - DNA, 33 bp, Homo sapien
aactgagtgatccacatatttacactatgggtt

SEQ ID NO: 1057195 - DNA, 33 bp, Homo sapien
gtgtgtttcagccaaggcttggaagatgagcac

SEQ ID NO: 1057196 - DNA, 33 bp, Homo sapien
gtgtgtttcagccaagtcttggaagatgagcac

SEQ ID NO: 1057197 - DNA, 33 bp, Homo sapien
tcatctgtgaagtgaacggatagggttagatga

SEQ ID NO: 1057198 - DNA, 33 bp, Homo sapien
tcatctgtgaagtgaagggatagggttagatga

SEQ ID NO: 1057199 - DNA, 33 bp, Homo sapien
gtcctacaaccccaagaaactgaattctgccag

SEQ ID NO: 1057200 - DNA, 33 bp, Homo sapien
gtcctacaaccccaagcaactgaattctgccag

SEQ ID NO: 1057201 - DNA, 33 bp, Homo sapien
tgatctcttttgaaaccgaagtctcatttgcct

SEQ ID NO: 1057202 - DNA, 33 bp, Homo sapien
tgatctcttttgaaactgaagtctcatttgcct

SEQ ID NO: 1057203 - DNA, 33 bp, Homo sapien
acagggacagatgaacaagaatggagagctttg

SEQ ID NO: 1057204 - DNA, 33 bp, Homo sapien
acagggacagatgaacgagaatggagagctttg

SEQ ID NO: 1057205 - DNA, 33 bp, Homo sapien
aacctcatctgtataacgggactcataatgccc

SEQ ID NO: 1057206 - DNA, 33 bp, Homo sapien
aacctcatctgtataatgggactcataatgccc

SEQ ID NO: 1057207 - DNA, 33 bp, Homo sapien
aactgaaacatgcatcaactctggagcaaagtc

SEQ ID NO: 1057208 - DNA, 33 bp, Homo sapien
aactgaaacatgcatcgactctggagcaaagtc

SEQ ID NO: 1057209 - DNA, 33 bp, Homo sapien
ttgtggattccattcccacagtgaataaggctg

SEQ ID NO: 1057210 - DNA, 33 bp, Homo sapien
ttgtggattccattcctacagtgaataaggctg

SEQ ID NO: 1057211 - DNA, 33 bp, Homo sapien
ctcctagagattcccaatgagattaagctccta

SEQ ID NO: 1057212 - DNA, 33 bp, Homo sapien
ctcctagagattcccagtgagattaagctccta

SEQ ID NO: 1057213 - DNA, 33 bp, Homo sapien
gagatgacagtagaaaagttaatagttgctagg

SEQ ID NO: 1057214 - DNA, 33 bp, Homo sapien
gagatgacagtagaaaggttaatagttgctagg

SEQ ID NO: 1057215 - DNA, 33 bp, Homo sapien
tgcctttaggaaagcaataccaccctcctagtc

SEQ ID NO: 1057216 - DNA, 33 bp, Homo sapien
tgcctttaggaaagcattaccaccctcctagtc

SEQ ID NO: 1057217 - DNA, 33 bp, Homo sapien
atgctacagagaagctcaagtagtgaacatagt

SEQ ID NO: 1057218 - DNA, 33 bp, Homo sapien
atgctacagagaagcttaagtagtgaacatagt

SEQ ID NO: 1057219 - DNA, 33 bp, Homo sapien
attaatagtactgctgaaaacatgctatcagtg

SEQ ID NO: 1057220 - DNA, 33 bp, Homo sapien
attaatagtactgctggaaacatgctatcagtg

SEQ ID NO: 1057221 - DNA, 33 bp, Homo sapien
tcctgatcaaactgagcacttcctcgtggtctc

SEQ ID NO: 1057222 - DNA, 33 bp, Homo sapien
tcctgatcaaactgagtacttcctcgtggtctc

SEQ ID NO: 1057223 - DNA, 33 bp, Homo sapien
tgcctaccttgcagaactattttccattacata

SEQ ID NO: 1057224 - DNA, 33 bp, Homo sapien
tgcctaccttgcagaattattttccattacata

SEQ ID NO: 1057225 - DNA, 33 bp, Homo sapien
cctcacaattatggtgaaaggcgaatgaggagc

SEQ ID NO: 1057226 - DNA, 33 bp, Homo sapien
cctcacaattatggtggaaggcgaatgaggagc

SEQ ID NO: 1057227 - DNA, 33 bp, Homo sapien
tgagtggctcaagccaagagatcctttttgcag

SEQ ID NO: 1057228 - DNA, 33 bp, Homo sapien
tgagtggctcaagccaggagatcctttttgcag

SEQ ID NO: 1057229 - DNA, 33 bp, Homo sapien
attaaaatgattgtacaacttccttgcccttat

SEQ ID NO: 1057230 - DNA, 33 bp, Homo sapien
attaaaatgattgtacgacttccttgcccttat

SEQ ID NO: 1057231 - DNA, 33 bp, Homo sapien
caaacttgaaccagagaaaatatgaggagatgt

SEQ ID NO: 1057232 - DNA, 33 bp, Homo sapien
caaacttgaaccagagcaaatatgaggagatgt

SEQ ID NO: 1057233 - DNA, 33 bp, Homo sapien
cgagatttattccaaagagtagactttgaagga

SEQ ID NO: 1057234 - DNA, 33 bp, Homo sapien
cgagatttattccaaatagtagactttgaagga

SEQ ID NO: 1057235 - DNA, 33 bp, Homo sapien
caacgttcataccaacagtccttgaaaggtctg

SEQ ID NO: 1057236 - DNA, 33 bp, Homo sapien
caacgttcataccaaccgtccttgaaaggtctg

SEQ ID NO: 1057237 - DNA, 33 bp, Homo sapien
aacagaatgtactaaaacgaggcagagagacaa

SEQ ID NO: 1057238 - DNA, 33 bp, Homo sapien
aacagaatgtactaaagcgaggcagagagacaa

SEQ ID NO: 1057239 - DNA, 33 bp, Homo sapien
atagcaccttttatgaactagctttagaaagtc

SEQ ID NO: 1057240 - DNA, 33 bp, Homo sapien
atagcaccttttatgacctagctttagaaagtc

SEQ ID NO: 1057241 - DNA, 33 bp, Homo sapien
tggtttcatagttatcaccacaatctaattcta

SEQ ID NO: 1057242 - DNA, 33 bp, Homo sapien
tggtttcatagttatcgccacaatctaattcta

SEQ ID NO: 1057243 - DNA, 33 bp, Homo sapien
ttggtcacagttcctacgaaatcctgcttgatg

SEQ ID NO: 1057244 - DNA, 33 bp, Homo sapien
ttggtcacagttcctatgaaatcctgcttgatg

SEQ ID NO: 1057245 - DNA, 33 bp, Homo sapien
tgtcacttactaagtacatcgagtaggaaattt

SEQ ID NO: 1057246 - DNA, 33 bp, Homo sapien
tgtcacttactaagtagatcgagtaggaaattt

SEQ ID NO: 1057247 - DNA, 33 bp, Homo sapien
tattaaaattgctgaggagtcccaacttgttgg

SEQ ID NO: 1057248 - DNA, 33 bp, Homo sapien
tattaaaattgctgagtagtcccaacttgttgg

SEQ ID NO: 1057249 - DNA, 33 bp, Homo sapien
cctaaggctatcagcaaaggataagttagaagt

SEQ ID NO: 1057250 - DNA, 33 bp, Homo sapien
cctaaggctatcagcataggataagttagaagt

SEQ ID NO: 1057251 - DNA, 33 bp, Homo sapien
cctggctatcttaacaacatttccacaaaaacg

SEQ ID NO: 1057252 - DNA, 33 bp, Homo sapien
cctggctatcttaacaccatttccacaaaaacg

SEQ ID NO: 1057253 - DNA, 33 bp, Homo sapien
aaaatccttacaaatacatgtctcaaatttcag

SEQ ID NO: 1057254 - DNA, 33 bp, Homo sapien
aaaatccttacaaatatatgtctcaaatttcag

SEQ ID NO: 1057255 - DNA, 33 bp, Homo sapien
cagtgactgaataatagcatttaagactctgaa

SEQ ID NO: 1057256 - DNA, 33 bp, Homo sapien
cagtgactgaataatatcatttaagactctgaa

SEQ ID NO: 1057257 - DNA, 33 bp, Homo sapien
acattattttgtgaaaaccagatctgcgccact

SEQ ID NO: 1057258 - DNA, 33 bp, Homo sapien
acattattttgtgaaatccagatctgcgccact

SEQ ID NO: 1057259 - DNA, 33 bp, Homo sapien
aaataagttttggagagtaaaaagatatatatg

SEQ ID NO: 1057260 - DNA, 33 bp, Homo sapien
aaataagttttggagattaaaaagatatatatg

SEQ ID NO: 1057261 - DNA, 33 bp, Homo sapien
tgacaggctacgggtgcatctaaatgcctgaaa

SEQ ID NO: 1057262 - DNA, 33 bp, Homo sapien
tgacaggctacgggtgtatctaaatgcctgaaa

SEQ ID NO: 1057263 - DNA, 33 bp, Homo sapien
gaacacaattcctaaaacattcactaacatcca

SEQ ID NO: 1057264 - DNA, 33 bp, Homo sapien
gaacacaattcctaaagcattcactaacatcca

SEQ ID NO: 1057265 - DNA, 33 bp, Homo sapien
aatgtgaataattggcaaatctaggtaaagggt

SEQ ID NO: 1057266 - DNA, 33 bp, Homo sapien
aatgtgaataattggcgaatctaggtaaagggt

SEQ ID NO: 1057267 - DNA, 33 bp, Homo sapien
agtatgcatttacacaaaaacagaaatacagtt

SEQ ID NO: 1057268 - DNA, 33 bp, Homo sapien
agtatgcatttacacagaaacagaaatacagtt

SEQ ID NO: 1057269 - DNA, 33 bp, Homo sapien
tctgaatgagtattgacataaagcataggttta

SEQ ID NO: 1057270 - DNA, 33 bp, Homo sapien
tctgaatgagtattgatataaagcataggttta

SEQ ID NO: 1057271 - DNA, 33 bp, Homo sapien
acaaaaatcaattccacgtagactaaagacact

SEQ ID NO: 1057272 - DNA, 33 bp, Homo sapien
acaaaaatcaattccatgtagactaaagacact

SEQ ID NO: 1057273 - DNA, 33 bp, Homo sapien
actaacccagtcaaaacgaaattatcttggttt

SEQ ID NO: 1057274 - DNA, 33 bp, Homo sapien
actaacccagtcaaaatgaaattatcttggttt

SEQ ID NO: 1057275 - DNA, 33 bp, Homo sapien
gctctgtacaagggaaactctctctctctcttc

SEQ ID NO: 1057276 - DNA, 33 bp, Homo sapien
gctctgtacaagggaatctctctctctctcttc

SEQ ID NO: 1057277 - DNA, 33 bp, Homo sapien
ttctcggtaggatcaaaaaagtgtcagcatcaa

SEQ ID NO: 1057278 - DNA, 33 bp, Homo sapien
ttctcggtaggatcaagaaagtgtcagcatcaa

SEQ ID NO: 1057279 - DNA, 33 bp, Homo sapien
catcaccagagctgcaatcaaaggggcccagcg

SEQ ID NO: 1057280 - DNA, 33 bp, Homo sapien
catcaccagagctgcagtcaaaggggcccagcg

SEQ ID NO: 1057281 - DNA, 33 bp, Homo sapien
catctgtacctgaagcccgcttactgaaagtct

SEQ ID NO: 1057282 - DNA, 33 bp, Homo sapien
catctgtacctgaagctcgcttactgaaagtct

SEQ ID NO: 1057283 - DNA, 33 bp, Homo sapien
tgacatacaatgcaagaatctttaaaaaatttt

SEQ ID NO: 1057284 - DNA, 33 bp, Homo sapien
tgacatacaatgcaagcatctttaaaaaatttt

SEQ ID NO: 1057285 - DNA, 33 bp, Homo sapien
atggagccactacttacctttcccacttcagct

SEQ ID NO: 1057286 - DNA, 33 bp, Homo sapien
atggagccactacttagctttcccacttcagct

SEQ ID NO: 1057287 - DNA, 33 bp, Homo sapien
ttcctcacttttggcgcatttgctcttggggca

SEQ ID NO: 1057288 - DNA, 33 bp, Homo sapien
ttcctcacttttggcgtatttgctcttggggca

SEQ ID NO: 1057289 - DNA, 33 bp, Homo sapien
tcatgtcactcactgtcaaatactcattttgac

SEQ ID NO: 1057290 - DNA, 33 bp, Homo sapien
tcatgtcactcactgtgaaatactcattttgac

SEQ ID NO: 1057291 - DNA, 33 bp, Homo sapien
caagttctttatgacccgagcttttgctgatct

SEQ ID NO: 1057292 - DNA, 33 bp, Homo sapien
caagttctttatgacctgagcttttgctgatct

SEQ ID NO: 1057293 - DNA, 33 bp, Homo sapien
ttaaatatgtcagaaaaggtctccaacaagtaa

SEQ ID NO: 1057294 - DNA, 33 bp, Homo sapien
ttaaatatgtcagaaagggtctccaacaagtaa

SEQ ID NO: 1057295 - DNA, 33 bp, Homo sapien
ctttctgtctatatgcaaccccatcagatgtat

SEQ ID NO: 1057296 - DNA, 33 bp, Homo sapien
ctttctgtctatatgcgaccccatcagatgtat

SEQ ID NO: 1057297 - DNA, 33 bp, Homo sapien
cctggcaaatgtgaaacctttccttcctaattt

SEQ ID NO: 1057298 - DNA, 33 bp, Homo sapien
cctggcaaatgtgaaatctttccttcctaattt

SEQ ID NO: 1057299 - DNA, 33 bp, Homo sapien
cttcctgaaatgtaaacgtctcttcctgattat

SEQ ID NO: 1057300 - DNA, 33 bp, Homo sapien
cttcctgaaatgtaaatgtctcttcctgattat

SEQ ID NO: 1057301 - DNA, 33 bp, Homo sapien
ggcagctcacatcaaacgacacgggtatataaa

SEQ ID NO: 1057302 - DNA, 33 bp, Homo sapien
ggcagctcacatcaaatgacacgggtatataaa

SEQ ID NO: 1057303 - DNA, 33 bp, Homo sapien
ggaattaaattaccaaagaaaccaagagcctgc

SEQ ID NO: 1057304 - DNA, 33 bp, Homo sapien
ggaattaaattaccaaggaaaccaagagcctgc

SEQ ID NO: 1057305 - DNA, 33 bp, Homo sapien
ttcaagaatttgaaggcatttgctgaaaccaaa

SEQ ID NO: 1057306 - DNA, 33 bp, Homo sapien
ttcaagaatttgaaggtatttgctgaaaccaaa

SEQ ID NO: 1057307 - DNA, 33 bp, Homo sapien
tgtgtttagctttagtcaatactgccaaacaga

SEQ ID NO: 1057308 - DNA, 33 bp, Homo sapien
tgtgtttagctttagttaatactgccaaacaga

SEQ ID NO: 1057309 - DNA, 33 bp, Homo sapien
tttttgcagactatgaagttttcaacaatgcat

SEQ ID NO: 1057310 - DNA, 33 bp, Homo sapien
tttttgcagactatgaggttttcaacaatgcat

SEQ ID NO: 1057311 - DNA, 33 bp, Homo sapien
acattcatctgtcaaacggatacatatgcttcc

SEQ ID NO: 1057312 - DNA, 33 bp, Homo sapien
acattcatctgtcaaatggatacatatgcttcc

SEQ ID NO: 1057313 - DNA, 33 bp, Homo sapien
gcattaggggacgcataagaagaaggtccacag

SEQ ID NO: 1057314 - DNA, 33 bp, Homo sapien
gcattaggggacgcatgagaagaaggtccacag

SEQ ID NO: 1057315 - DNA, 33 bp, Homo sapien
cccaaagtgaaaatacaatacgcggacaggtta

SEQ ID NO: 1057316 - DNA, 33 bp, Homo sapien
cccaaagtgaaaatacgatacgcggacaggtta

SEQ ID NO: 1057317 - DNA, 33 bp, Homo sapien
acattgtccaatatacaataaaaggtaataaat

SEQ ID NO: 1057318 - DNA, 33 bp, Homo sapien
acattgtccaatataccataaaaggtaataaat

SEQ ID NO: 1057319 - DNA, 33 bp, Homo sapien
gtcataagttgtcaagcagataatatttttgtg

SEQ ID NO: 1057320 - DNA, 33 bp, Homo sapien
gtcataagttgtcaaggagataatatttttgtg

SEQ ID NO: 1057321 - DNA, 33 bp, Homo sapien
agagcaggaatagataacttatggtgcctcttg

SEQ ID NO: 1057322 - DNA, 33 bp, Homo sapien
agagcaggaatagatatcttatggtgcctcttg

SEQ ID NO: 1057323 - DNA, 33 bp, Homo sapien
gacctctgacaatgaaattaaacaccacatgca

SEQ ID NO: 1057324 - DNA, 33 bp, Homo sapien
gacctctgacaatgaagttaaacaccacatgca

SEQ ID NO: 1057325 - DNA, 33 bp, Homo sapien
acctggccaaacgtcaataacggaaaccctggg

SEQ ID NO: 1057326 - DNA, 33 bp, Homo sapien
acctggccaaacgtcagtaacggaaaccctggg

SEQ ID NO: 1057327 - DNA, 33 bp, Homo sapien
gatacttaatgaagtaaacagaaaacaattaca

SEQ ID NO: 1057328 - DNA, 33 bp, Homo sapien
gatacttaatgaagtacacagaaaacaattaca

SEQ ID NO: 1057329 - DNA, 33 bp, Homo sapien
agacaatcaaataaaaatacttaaatgccatac

SEQ ID NO: 1057330 - DNA, 33 bp, Homo sapien
agacaatcaaataaaagtacttaaatgccatac

SEQ ID NO: 1057331 - DNA, 33 bp, Homo sapien
ccaacagttttaatgacgtcaaacctggagggt

SEQ ID NO: 1057332 - DNA, 33 bp, Homo sapien
ccaacagttttaatgatgtcaaacctggagggt

SEQ ID NO: 1057333 - DNA, 33 bp, Homo sapien
catttgactttgccacgcctgggatagtgcttt

SEQ ID NO: 1057334 - DNA, 33 bp, Homo sapien
catttgactttgccactcctgggatagtgcttt

SEQ ID NO: 1057335 - DNA, 33 bp, Homo sapien
gaactcataacgttacagaacttctaagtgaag

SEQ ID NO: 1057336 - DNA, 33 bp, Homo sapien
gaactcataacgttacggaacttctaagtgaag

SEQ ID NO: 1057337 - DNA, 33 bp, Homo sapien
atacaacagctacacaaaggatatattaccccc

SEQ ID NO: 1057338 - DNA, 33 bp, Homo sapien
atacaacagctacacagaggatatattaccccc

SEQ ID NO: 1057339 - DNA, 33 bp, Homo sapien
atgtagttgccataaaatatgttaatagctata

SEQ ID NO: 1057340 - DNA, 33 bp, Homo sapien
atgtagttgccataaagtatgttaatagctata

SEQ ID NO: 1057341 - DNA, 33 bp, Homo sapien
agggccaaaggtcaaaactttctgtgcacaaaa

SEQ ID NO: 1057342 - DNA, 33 bp, Homo sapien
agggccaaaggtcaaatctttctgtgcacaaaa

SEQ ID NO: 1057343 - DNA, 33 bp, Homo sapien
acagatctcttacttccaggcttgtccaccttg

SEQ ID NO: 1057344 - DNA, 33 bp, Homo sapien
acagatctcttacttcgaggcttgtccaccttg

SEQ ID NO: 1057345 - DNA, 33 bp, Homo sapien
tgaccatatttgtgctgaaatcctgtttcttac

SEQ ID NO: 1057346 - DNA, 33 bp, Homo sapien
tgaccatatttgtgcttaaatcctgtttcttac

SEQ ID NO: 1057347 - DNA, 33 bp, Homo sapien
ccacccttcaggcagaaaattctgagagtcgtt

SEQ ID NO: 1057348 - DNA, 33 bp, Homo sapien
ccacccttcaggcagagaattctgagagtcgtt

SEQ ID NO: 1057349 - DNA, 33 bp, Homo sapien
acggaattacagtggaagtttgaacagtggaga

SEQ ID NO: 1057350 - DNA, 33 bp, Homo sapien
acggaattacagtggaggtttgaacagtggaga

SEQ ID NO: 1057351 - DNA, 33 bp, Homo sapien
gtcttggcaaagttgccagaaatgaagatgggc

SEQ ID NO: 1057352 - DNA, 33 bp, Homo sapien
gtcttggcaaagttgctagaaatgaagatgggc

SEQ ID NO: 1057353 - DNA, 33 bp, Homo sapien
acagcctttgctagcaagaaagagttaagttag

SEQ ID NO: 1057354 - DNA, 33 bp, Homo sapien
acagcctttgctagcacgaaagagttaagttag

SEQ ID NO: 1057355 - DNA, 33 bp, Homo sapien
atggaatcataaagtacggactcctacatttgt

SEQ ID NO: 1057356 - DNA, 33 bp, Homo sapien
atggaatcataaagtatggactcctacatttgt

SEQ ID NO: 1057357 - DNA, 33 bp, Homo sapien
ctttgatcatcatgacaatctctggacagcaga

SEQ ID NO: 1057358 - DNA, 33 bp, Homo sapien
ctttgatcatcatgacgatctctggacagcaga

SEQ ID NO: 1057359 - DNA, 33 bp, Homo sapien
tttgcttagagtatcaaaaggttaaaatcaagg

SEQ ID NO: 1057360 - DNA, 33 bp, Homo sapien
tttgcttagagtatcataaggttaaaatcaagg

SEQ ID NO: 1057361 - DNA, 33 bp, Homo sapien
cctggaggagtggaaaatgatgttgttcagtca

SEQ ID NO: 1057362 - DNA, 33 bp, Homo sapien
cctggaggagtggaaagtgatgttgttcagtca

SEQ ID NO: 1057363 - DNA, 33 bp, Homo sapien
cctgtagaactttccaatctatattcagccgat

SEQ ID NO: 1057364 - DNA, 33 bp, Homo sapien
cctgtagaactttccagtctatattcagccgat

SEQ ID NO: 1057365 - DNA, 33 bp, Homo sapien
gagtgtccaaagatgacgagccacaaatttgaa

SEQ ID NO: 1057366 - DNA, 33 bp, Homo sapien
gagtgtccaaagatgatgagccacaaatttgaa

SEQ ID NO: 1057367 - DNA, 33 bp, Homo sapien
atatgtttcgagtacaatcaggcctaggaactg

SEQ ID NO: 1057368 - DNA, 33 bp, Homo sapien
atatgtttcgagtacagtcaggcctaggaactg

SEQ ID NO: 1057369 - DNA, 33 bp, Homo sapien
taacaatctggaaggtcaaattcaagtttgcaa

SEQ ID NO: 1057370 - DNA, 33 bp, Homo sapien
taacaatctggaaggttaaattcaagtttgcaa

SEQ ID NO: 1057371 - DNA, 33 bp, Homo sapien
caggcatctgcctcgaagttcacagtgtttgtt

SEQ ID NO: 1057372 - DNA, 33 bp, Homo sapien
caggcatctgcctcgaggttcacagtgtttgtt

SEQ ID NO: 1057373 - DNA, 33 bp, Homo sapien
tatagttcctctcaccagaagaattcaattcct

SEQ ID NO: 1057374 - DNA, 33 bp, Homo sapien
tatagttcctctcaccggaagaattcaattcct

SEQ ID NO: 1057375 - DNA, 33 bp, Homo sapien
aagcaaaaaggtgaacaatatctttatggcttg

SEQ ID NO: 1057376 - DNA, 33 bp, Homo sapien
aagcaaaaaggtgaacgatatctttatggcttg

SEQ ID NO: 1057377 - DNA, 33 bp, Homo sapien
taaaatagcctccaggaaaacaggtttttatag

SEQ ID NO: 1057378 - DNA, 33 bp, Homo sapien
taaaatagcctccagggaaacaggtttttatag

SEQ ID NO: 1057379 - DNA, 33 bp, Homo sapien
aactccttttctcctcgcaggatcacagttgta

SEQ ID NO: 1057380 - DNA, 33 bp, Homo sapien
aactccttttctcctctcaggatcacagttgta

SEQ ID NO: 1057381 - DNA, 33 bp, Homo sapien
ttctggtttctctggcacatagctgacatcaca

SEQ ID NO: 1057382 - DNA, 33 bp, Homo sapien
ttctggtttctctggcgcatagctgacatcaca

SEQ ID NO: 1057383 - DNA, 33 bp, Homo sapien
tgcacctgtaaatctgaacgaaagccagaaaca

SEQ ID NO: 1057384 - DNA, 33 bp, Homo sapien
tgcacctgtaaatctgcacgaaagccagaaaca

SEQ ID NO: 1057385 - DNA, 33 bp, Homo sapien
gcatcttaccttcaaactcatcccaggagttag

SEQ ID NO: 1057386 - DNA, 33 bp, Homo sapien
gcatcttaccttcaaagtcatcccaggagttag

SEQ ID NO: 1057387 - DNA, 33 bp, Homo sapien
tggcaggcagcccttacaagtgggactggaagc

SEQ ID NO: 1057388 - DNA, 33 bp, Homo sapien
tggcaggcagcccttataagtgggactggaagc

SEQ ID NO: 1057389 - DNA, 33 bp, Homo sapien
tttcagaagacacatacgaaggaaacataaact

SEQ ID NO: 1057390 - DNA, 33 bp, Homo sapien
tttcagaagacacatatgaaggaaacataaact

SEQ ID NO: 1057391 - DNA, 33 bp, Homo sapien
tgccctgtcgccggaacaaccagaatgctggtg

SEQ ID NO: 1057392 - DNA, 33 bp, Homo sapien
tgccctgtcgccggaataaccagaatgctggtg

SEQ ID NO: 1057393 - DNA, 33 bp, Homo sapien
atccaaaaggctccaaaagtttaaagacactgc

SEQ ID NO: 1057394 - DNA, 33 bp, Homo sapien
atccaaaaggctccaagagtttaaagacactgc

SEQ ID NO: 1057395 - DNA, 33 bp, Homo sapien
cctcatgtgacattacactgtatggggttgaac

SEQ ID NO: 1057396 - DNA, 33 bp, Homo sapien
cctcatgtgacattacgctgtatggggttgaac

SEQ ID NO: 1057397 - DNA, 33 bp, Homo sapien
tgtcaagatcattttacgtccttcagtcattag

SEQ ID NO: 1057398 - DNA, 33 bp, Homo sapien
tgtcaagatcattttatgtccttcagtcattag

SEQ ID NO: 1057399 - DNA, 33 bp, Homo sapien
aatggtttatgcaggaacatcctctccgggaag

SEQ ID NO: 1057400 - DNA, 33 bp, Homo sapien
aatggtttatgcaggagcatcctctccgggaag

SEQ ID NO: 1057401 - DNA, 33 bp, Homo sapien
tccgttgtaggaaaaacctgaagacataagaac

SEQ ID NO: 1057402 - DNA, 33 bp, Homo sapien
tccgttgtaggaaaaatctgaagacataagaac

SEQ ID NO: 1057403 - DNA, 33 bp, Homo sapien
tattacgactttaccaacaggttttgagtttac

SEQ ID NO: 1057404 - DNA, 33 bp, Homo sapien
tattacgactttaccagcaggttttgagtttac

SEQ ID NO: 1057405 - DNA, 33 bp, Homo sapien
tatctcttatctactgcagcagatcaacacatg

SEQ ID NO: 1057406 - DNA, 33 bp, Homo sapien
tatctcttatctactgtagcagatcaacacatg

SEQ ID NO: 1057407 - DNA, 33 bp, Homo sapien
ttttttacagccattacatgagacagatactgg

SEQ ID NO: 1057408 - DNA, 33 bp, Homo sapien
ttttttacagccattatatgagacagatactgg

SEQ ID NO: 1057409 - DNA, 33 bp, Homo sapien
ccctcatttgtcctcacagctaaatagaagtaa

SEQ ID NO: 1057410 - DNA, 33 bp, Homo sapien
ccctcatttgtcctcatagctaaatagaagtaa

SEQ ID NO: 1057411 - DNA, 33 bp, Homo sapien
ccacctgctgcctatcaaagatctcagtccatc

SEQ ID NO: 1057412 - DNA, 33 bp, Homo sapien
ccacctgctgcctatcgaagatctcagtccatc

SEQ ID NO: 1057413 - DNA, 33 bp, Homo sapien
ccttcccattttaatcgctacccctgcctccac

SEQ ID NO: 1057414 - DNA, 33 bp, Homo sapien
ccttcccattttaatctctacccctgcctccac

SEQ ID NO: 1057415 - DNA, 33 bp, Homo sapien
gggggaaagagaagtacaagaattattatcaga

SEQ ID NO: 1057416 - DNA, 33 bp, Homo sapien
gggggaaagagaagtagaagaattattatcaga

SEQ ID NO: 1057417 - DNA, 33 bp, Homo sapien
tatgggattgaatctaaagagtttaagccttac

SEQ ID NO: 1057418 - DNA, 33 bp, Homo sapien
tatgggattgaatctagagagtttaagccttac

SEQ ID NO: 1057419 - DNA, 33 bp, Homo sapien
taccttttcatagacacccactattttcccccc

SEQ ID NO: 1057420 - DNA, 33 bp, Homo sapien
taccttttcatagacatccactattttcccccc

SEQ ID NO: 1057421 - DNA, 33 bp, Homo sapien
aacagacaatcacgaacggtaacagatgcttac

SEQ ID NO: 1057422 - DNA, 33 bp, Homo sapien
aacagacaatcacgaatggtaacagatgcttac

SEQ ID NO: 1057423 - DNA, 33 bp, Homo sapien
actttcagtcgatttaaattgaaggctgcaggc

SEQ ID NO: 1057424 - DNA, 33 bp, Homo sapien
actttcagtcgatttagattgaaggctgcaggc

SEQ ID NO: 1057425 - DNA, 33 bp, Homo sapien
ttggaacccctcggaaagtctagaatgtaactt

SEQ ID NO: 1057426 - DNA, 33 bp, Homo sapien
ttggaacccctcggaacgtctagaatgtaactt

SEQ ID NO: 1057427 - DNA, 33 bp, Homo sapien
aattatgaatacaccacgtataaaaatgtcatt

SEQ ID NO: 1057428 - DNA, 33 bp, Homo sapien
aattatgaatacaccatgtataaaaatgtcatt

SEQ ID NO: 1057429 - DNA, 33 bp, Homo sapien
atacatgattaagttacattacactagagtaca

SEQ ID NO: 1057430 - DNA, 33 bp, Homo sapien
atacatgattaagttagattacactagagtaca

SEQ ID NO: 1057431 - DNA, 33 bp, Homo sapien
tttgcctgaaggaaccaagaattttccagaaat

SEQ ID NO: 1057432 - DNA, 33 bp, Homo sapien
tttgcctgaaggaaccgagaattttccagaaat

SEQ ID NO: 1057433 - DNA, 33 bp, Homo sapien
caaccacctactcactcacccactgtgtacttg

SEQ ID NO: 1057434 - DNA, 33 bp, Homo sapien
caaccacctactcacttacccactgtgtacttg

SEQ ID NO: 1057435 - DNA, 33 bp, Homo sapien
agacttgtcaggaacaaaatgcaactagaggga

SEQ ID NO: 1057436 - DNA, 33 bp, Homo sapien
agacttgtcaggaacagaatgcaactagaggga

SEQ ID NO: 1057437 - DNA, 33 bp, Homo sapien
aaaaactgttcctatcaattttagcagtcatta

SEQ ID NO: 1057438 - DNA, 33 bp, Homo sapien
aaaaactgttcctatccattttagcagtcatta

SEQ ID NO: 1057439 - DNA, 33 bp, Homo sapien
tggctaccagcagaagcatggaagaaggagctc

SEQ ID NO: 1057440 - DNA, 33 bp, Homo sapien
tggctaccagcagaagtatggaagaaggagctc

SEQ ID NO: 1057441 - DNA, 33 bp, Homo sapien
atgtttaaggacatgcccaagtaataaagactt

SEQ ID NO: 1057442 - DNA, 33 bp, Homo sapien
atgtttaaggacatgctcaagtaataaagactt

SEQ ID NO: 1057443 - DNA, 33 bp, Homo sapien
catagaaaacccttcaccctggccaggcacggt

SEQ ID NO: 1057444 - DNA, 33 bp, Homo sapien
catagaaaacccttcatcctggccaggcacggt

SEQ ID NO: 1057445 - DNA, 33 bp, Homo sapien
ttgaatctggagataacgatgaactgatcacac

SEQ ID NO: 1057446 - DNA, 33 bp, Homo sapien
ttgaatctggagataatgatgaactgatcacac

SEQ ID NO: 1057447 - DNA, 33 bp, Homo sapien
aattggctgccagggtaaagaatacatttgtga

SEQ ID NO: 1057448 - DNA, 33 bp, Homo sapien
aattggctgccagggtgaagaatacatttgtga

SEQ ID NO: 1057449 - DNA, 33 bp, Homo sapien
ttcctttaccaacttacgttcaagtggtggggc

SEQ ID NO: 1057450 - DNA, 33 bp, Homo sapien
ttcctttaccaacttatgttcaagtggtggggc

SEQ ID NO: 1057451 - DNA, 33 bp, Homo sapien
cagccacagaaagaagccttatctaaacttagg

SEQ ID NO: 1057452 - DNA, 33 bp, Homo sapien
cagccacagaaagaaggcttatctaaacttagg

SEQ ID NO: 1057453 - DNA, 33 bp, Homo sapien
tattcttgccttgttaaacaaaaccatgagtca

SEQ ID NO: 1057454 - DNA, 33 bp, Homo sapien
tattcttgccttgttagacaaaaccatgagtca

SEQ ID NO: 1057455 - DNA, 33 bp, Homo sapien
caaaattacagagccaataaattcagatgatca

SEQ ID NO: 1057456 - DNA, 33 bp, Homo sapien
caaaattacagagccagtaaattcagatgatca

SEQ ID NO: 1057457 - DNA, 33 bp, Homo sapien
agttgtatagttgcataaagagtgataagcatg

SEQ ID NO: 1057458 - DNA, 33 bp, Homo sapien
agttgtatagttgcatgaagagtgataagcatg

SEQ ID NO: 1057459 - DNA, 33 bp, Homo sapien
tctcttgtcctatctaagtgattaaacattgat

SEQ ID NO: 1057460 - DNA, 33 bp, Homo sapien
tctcttgtcctatctaggtgattaaacattgat

SEQ ID NO: 1057461 - DNA, 33 bp, Homo sapien
aatccgtggaaaccacgaatctgacctctactt

SEQ ID NO: 1057462 - DNA, 33 bp, Homo sapien
aatccgtggaaaccactaatctgacctctactt

SEQ ID NO: 1057463 - DNA, 33 bp, Homo sapien
ttccgaaactaggacacagaaggccttgcagct

SEQ ID NO: 1057464 - DNA, 33 bp, Homo sapien
ttccgaaactaggacatagaaggccttgcagct

SEQ ID NO: 1057465 - DNA, 33 bp, Homo sapien
ggacacagaaagaataagaacatttctggctgt

SEQ ID NO: 1057466 - DNA, 33 bp, Homo sapien
ggacacagaaagaatacgaacatttctggctgt

SEQ ID NO: 1057467 - DNA, 33 bp, Homo sapien
agagtttggaataccaaaatgggacttcttaaa

SEQ ID NO: 1057468 - DNA, 33 bp, Homo sapien
agagtttggaataccagaatgggacttcttaaa

SEQ ID NO: 1057469 - DNA, 33 bp, Homo sapien
ttgttacgtcaaccaaatctccctgcctcctga

SEQ ID NO: 1057470 - DNA, 33 bp, Homo sapien
ttgttacgtcaaccaagtctccctgcctcctga

SEQ ID NO: 1057471 - DNA, 33 bp, Homo sapien
cagagttcttgtctaacggtgtttaaaagagac

SEQ ID NO: 1057472 - DNA, 33 bp, Homo sapien
cagagttcttgtctaatggtgtttaaaagagac

SEQ ID NO: 1057473 - DNA, 33 bp, Homo sapien
atggggtagggattagcaaacctgcaaacaggg

SEQ ID NO: 1057474 - DNA, 33 bp, Homo sapien
atggggtagggattaggaaacctgcaaacaggg

SEQ ID NO: 1057475 - DNA, 33 bp, Homo sapien
gctgatcaggagatcacagaatgtggccccaag

SEQ ID NO: 1057476 - DNA, 33 bp, Homo sapien
gctgatcaggagatcatagaatgtggccccaag

SEQ ID NO: 1057477 - DNA, 33 bp, Homo sapien
aataactgtggtagggaaagcccaatgtggttc

SEQ ID NO: 1057478 - DNA, 33 bp, Homo sapien
aataactgtggtaggggaagcccaatgtggttc

SEQ ID NO: 1057479 - DNA, 33 bp, Homo sapien
caagtacagtctgatgaaaaggaggagccaagt

SEQ ID NO: 1057480 - DNA, 33 bp, Homo sapien
caagtacagtctgatggaaaggaggagccaagt

SEQ ID NO: 1057481 - DNA, 33 bp, Homo sapien
ggaattgtagaatgtaagttgtgcctcagttta

SEQ ID NO: 1057482 - DNA, 33 bp, Homo sapien
ggaattgtagaatgtaggttgtgcctcagttta

SEQ ID NO: 1057483 - DNA, 33 bp, Homo sapien
caattttggttgatggcagtcagaaaaaatgct

SEQ ID NO: 1057484 - DNA, 33 bp, Homo sapien
caattttggttgatggtagtcagaaaaaatgct

SEQ ID NO: 1057485 - DNA, 33 bp, Homo sapien
atgggtcacacaagaaatcatttgcatgagtta

SEQ ID NO: 1057486 - DNA, 33 bp, Homo sapien
atgggtcacacaagaagtcatttgcatgagtta

SEQ ID NO: 1057487 - DNA, 33 bp, Homo sapien
aacagttgataaatagcacttctggttgtacat

SEQ ID NO: 1057488 - DNA, 33 bp, Homo sapien
aacagttgataaatagtacttctggttgtacat

SEQ ID NO: 1057489 - DNA, 33 bp, Homo sapien
gggtgactgtaagtcaatcatggacatttcatt

SEQ ID NO: 1057490 - DNA, 33 bp, Homo sapien
gggtgactgtaagtcagtcatggacatttcatt

SEQ ID NO: 1057491 - DNA, 33 bp, Homo sapien
accatcctttagcccactaacaatatgaaaatc

SEQ ID NO: 1057492 - DNA, 33 bp, Homo sapien
accatcctttagcccattaacaatatgaaaatc

SEQ ID NO: 1057493 - DNA, 33 bp, Homo sapien
gaaaagacagtggagaaaggaaatttgtaatat

SEQ ID NO: 1057494 - DNA, 33 bp, Homo sapien
gaaaagacagtggagagaggaaatttgtaatat

SEQ ID NO: 1057495 - DNA, 33 bp, Homo sapien
aaataagatatatcaaaagattactatgtgcca

SEQ ID NO: 1057496 - DNA, 33 bp, Homo sapien
aaataagatatatcaagagattactatgtgcca

SEQ ID NO: 1057497 - DNA, 33 bp, Homo sapien
tactttgtgatccttgaaataaataaaagtgta

SEQ ID NO: 1057498 - DNA, 33 bp, Homo sapien
tactttgtgatccttggaataaataaaagtgta

SEQ ID NO: 1057499 - DNA, 33 bp, Homo sapien
gtcaacaggggcaaaagtggttcccaaccatga

SEQ ID NO: 1057500 - DNA, 33 bp, Homo sapien
gtcaacaggggcaaaattggttcccaaccatga

SEQ ID NO: 1057501 - DNA, 33 bp, Homo sapien
accagaacctcattaactgatgcatataataag

SEQ ID NO: 1057502 - DNA, 33 bp, Homo sapien
accagaacctcattaattgatgcatataataag

SEQ ID NO: 1057503 - DNA, 33 bp, Homo sapien
ggacagatgagtagtacaagcagagagatggaa

SEQ ID NO: 1057504 - DNA, 33 bp, Homo sapien
ggacagatgagtagtataagcagagagatggaa

SEQ ID NO: 1057505 - DNA, 33 bp, Homo sapien
agagcacagatactagaaattcgttccaggagg

SEQ ID NO: 1057506 - DNA, 33 bp, Homo sapien
agagcacagatactagcaattcgttccaggagg

SEQ ID NO: 1057507 - DNA, 33 bp, Homo sapien
aagtcattgtttgaaacatacagcaatcaggca

SEQ ID NO: 1057508 - DNA, 33 bp, Homo sapien
aagtcattgtttgaaatatacagcaatcaggca

SEQ ID NO: 1057509 - DNA, 33 bp, Homo sapien
ctggtgctgaaaaagactccaagaaaatatact

SEQ ID NO: 1057510 - DNA, 33 bp, Homo sapien
ctggtgctgaaaaagagtccaagaaaatatact

SEQ ID NO: 1057511 - DNA, 33 bp, Homo sapien
ctttacttcctgcttacgcaaaacctcaatgtc

SEQ ID NO: 1057512 - DNA, 33 bp, Homo sapien
ctttacttcctgcttatgcaaaacctcaatgtc

SEQ ID NO: 1057513 - DNA, 33 bp, Homo sapien
ccacaatattttcttaccaaaatttagcagtgt

SEQ ID NO: 1057514 - DNA, 33 bp, Homo sapien
ccacaatattttcttatcaaaatttagcagtgt

SEQ ID NO: 1057515 - DNA, 33 bp, Homo sapien
gtccctcagggaaacactagattgatcaaaacc

SEQ ID NO: 1057516 - DNA, 33 bp, Homo sapien
gtccctcagggaaacattagattgatcaaaacc

SEQ ID NO: 1057517 - DNA, 33 bp, Homo sapien
aatcctgcagacctaccaagggacaaaatgcgc

SEQ ID NO: 1057518 - DNA, 33 bp, Homo sapien
aatcctgcagacctactaagggacaaaatgcgc

SEQ ID NO: 1057519 - DNA, 33 bp, Homo sapien
tccttaataggtacatgaactacattttctgca

SEQ ID NO: 1057520 - DNA, 33 bp, Homo sapien
tccttaataggtacattaactacattttctgca

SEQ ID NO: 1057521 - DNA, 33 bp, Homo sapien
ggctagtttacctggcactgactaaaccagtgg

SEQ ID NO: 1057522 - DNA, 33 bp, Homo sapien
ggctagtttacctggcgctgactaaaccagtgg

SEQ ID NO: 1057523 - DNA, 33 bp, Homo sapien
ttaactcgtcaaagacactataaaactcaacaa

SEQ ID NO: 1057524 - DNA, 33 bp, Homo sapien
ttaactcgtcaaagacgctataaaactcaacaa

SEQ ID NO: 1057525 - DNA, 33 bp, Homo sapien
cctctaatttatctcacagaagtacagcctggt

SEQ ID NO: 1057526 - DNA, 33 bp, Homo sapien
cctctaatttatctcagagaagtacagcctggt

SEQ ID NO: 1057527 - DNA, 33 bp, Homo sapien
taggatagctacgagcagaagaacataaaggca

SEQ ID NO: 1057528 - DNA, 33 bp, Homo sapien
taggatagctacgagcggaagaacataaaggca

SEQ ID NO: 1057529 - DNA, 33 bp, Homo sapien
tttcatgttcttgacaccccatagccctagtcc

SEQ ID NO: 1057530 - DNA, 33 bp, Homo sapien
tttcatgttcttgacatcccatagccctagtcc

SEQ ID NO: 1057531 - DNA, 33 bp, Homo sapien
aggtcataagaacttccacagtcagggagatga

SEQ ID NO: 1057532 - DNA, 33 bp, Homo sapien
aggtcataagaacttcgacagtcagggagatga

SEQ ID NO: 1057533 - DNA, 33 bp, Homo sapien
gggtcacagaaggaaacggacaactcagggaaa

SEQ ID NO: 1057534 - DNA, 33 bp, Homo sapien
gggtcacagaaggaaatggacaactcagggaaa

SEQ ID NO: 1057535 - DNA, 33 bp, Homo sapien
gataggaaagctacaaaagaaagaagtctaggt

SEQ ID NO: 1057536 - DNA, 33 bp, Homo sapien
gataggaaagctacaagagaaagaagtctaggt

SEQ ID NO: 1057537 - DNA, 33 bp, Homo sapien
gtttgggtatttgaggaacgaggattggtttaa

SEQ ID NO: 1057538 - DNA, 33 bp, Homo sapien
gtttgggtatttgagggacgaggattggtttaa

SEQ ID NO: 1057539 - DNA, 33 bp, Homo sapien
atggagataggtaaaacaggaagtgagttgtta

SEQ ID NO: 1057540 - DNA, 33 bp, Homo sapien
atggagataggtaaaagaggaagtgagttgtta

SEQ ID NO: 1057541 - DNA, 33 bp, Homo sapien
ctcttacgtgaaaagaatattacaatgatgaaa

SEQ ID NO: 1057542 - DNA, 33 bp, Homo sapien
ctcttacgtgaaaagactattacaatgatgaaa

SEQ ID NO: 1057543 - DNA, 33 bp, Homo sapien
gttttcatttaaggaactccaatttgaaaaaaa

SEQ ID NO: 1057544 - DNA, 33 bp, Homo sapien
gttttcatttaaggaagtccaatttgaaaaaaa

SEQ ID NO: 1057545 - DNA, 33 bp, Homo sapien
ttcctatagtggatgacgtggtgtgtaggacct

SEQ ID NO: 1057546 - DNA, 33 bp, Homo sapien
ttcctatagtggatgatgtggtgtgtaggacct

SEQ ID NO: 1057547 - DNA, 33 bp, Homo sapien
tggtggttttataactcacaaggtgaatggtga

SEQ ID NO: 1057548 - DNA, 33 bp, Homo sapien
tggtggttttataacttacaaggtgaatggtga

SEQ ID NO: 1057549 - DNA, 33 bp, Homo sapien
gcggcatgggttgagaactgctcaatgagatgt

SEQ ID NO: 1057550 - DNA, 33 bp, Homo sapien
gcggcatgggttgagagctgctcaatgagatgt

SEQ ID NO: 1057551 - DNA, 33 bp, Homo sapien
gcaaaaatcccagctacaggcccaagtgatcaa

SEQ ID NO: 1057552 - DNA, 33 bp, Homo sapien
gcaaaaatcccagctagaggcccaagtgatcaa

SEQ ID NO: 1057553 - DNA, 33 bp, Homo sapien
caagacactgtgcttaaagatgtcagacacatg

SEQ ID NO: 1057554 - DNA, 33 bp, Homo sapien
caagacactgtgcttagagatgtcagacacatg

SEQ ID NO: 1057555 - DNA, 33 bp, Homo sapien
tttcatctgggctttacaaaccacaaaagcaac

SEQ ID NO: 1057556 - DNA, 33 bp, Homo sapien
tttcatctgggctttagaaaccacaaaagcaac

SEQ ID NO: 1057557 - DNA, 33 bp, Homo sapien
ttgtttcttctgctgagaatcacatctcttcct

SEQ ID NO: 1057558 - DNA, 33 bp, Homo sapien
ttgtttcttctgctgataatcacatctcttcct

SEQ ID NO: 1057559 - DNA, 33 bp, Homo sapien
gtcctacaaccattagaaacaggtaatttaagt

SEQ ID NO: 1057560 - DNA, 33 bp, Homo sapien
gtcctacaaccattagcaacaggtaatttaagt

SEQ ID NO: 1057561 - DNA, 33 bp, Homo sapien
gatgtgacagtgcagcgataatgaagtcctaca

SEQ ID NO: 1057562 - DNA, 33 bp, Homo sapien
gatgtgacagtgcagctataatgaagtcctaca

SEQ ID NO: 1057563 - DNA, 33 bp, Homo sapien
aatatatcctgataccaaattcaagaccttttt

SEQ ID NO: 1057564 - DNA, 33 bp, Homo sapien
aatatatcctgataccgaattcaagaccttttt

SEQ ID NO: 1057565 - DNA, 33 bp, Homo sapien
cctgatttccaagtatgacagctcagtgacaac

SEQ ID NO: 1057566 - DNA, 33 bp, Homo sapien
cctgatttccaagtattacagctcagtgacaac

SEQ ID NO: 1057567 - DNA, 33 bp, Homo sapien
tatatcttccttcaagaagcaagccatgaacaa

SEQ ID NO: 1057568 - DNA, 33 bp, Homo sapien
tatatcttccttcaagcagcaagccatgaacaa

SEQ ID NO: 1057569 - DNA, 33 bp, Homo sapien
gaagaagtagattgaaatgtatctttttaacca

SEQ ID NO: 1057570 - DNA, 33 bp, Homo sapien
gaagaagtagattgaactgtatctttttaacca

SEQ ID NO: 1057571 - DNA, 33 bp, Homo sapien
gaacaatattgaagaacactgcaagaaaaactc

SEQ ID NO: 1057572 - DNA, 33 bp, Homo sapien
gaacaatattgaagaagactgcaagaaaaactc

SEQ ID NO: 1057573 - DNA, 33 bp, Homo sapien
ggtaatggatatgatggttatcttgattttggt

SEQ ID NO: 1057574 - DNA, 33 bp, Homo sapien
ggtaatggatatgatgtttatcttgattttggt

SEQ ID NO: 1057575 - DNA, 33 bp, Homo sapien
cttaacacattccatacacttcatgtttcttct

SEQ ID NO: 1057576 - DNA, 33 bp, Homo sapien
cttaacacattccatatacttcatgtttcttct

SEQ ID NO: 1057577 - DNA, 33 bp, Homo sapien
tctcatttgtaaaatacggatgataatagtacc

SEQ ID NO: 1057578 - DNA, 33 bp, Homo sapien
tctcatttgtaaaatatggatgataatagtacc

SEQ ID NO: 1057579 - DNA, 33 bp, Homo sapien
ggagactgattctacacagctttcattcggttg

SEQ ID NO: 1057580 - DNA, 33 bp, Homo sapien
ggagactgattctacatagctttcattcggttg

SEQ ID NO: 1057581 - DNA, 33 bp, Homo sapien
cttgtccactgcttcactcctgaaaccacagct

SEQ ID NO: 1057582 - DNA, 33 bp, Homo sapien
cttgtccactgcttcattcctgaaaccacagct

SEQ ID NO: 1057583 - DNA, 33 bp, Homo sapien
tgtgtacacaaatatggattaatggctaagcac

SEQ ID NO: 1057584 - DNA, 33 bp, Homo sapien
tgtgtacacaaatatgtattaatggctaagcac

SEQ ID NO: 1057585 - DNA, 33 bp, Homo sapien
gggattaggacatatgaacctctgtgggatggt

SEQ ID NO: 1057586 - DNA, 33 bp, Homo sapien
gggattaggacatatggacctctgtgggatggt

SEQ ID NO: 1057587 - DNA, 33 bp, Homo sapien
agctaagtgactccaccaatctgtctcaaagca

SEQ ID NO: 1057588 - DNA, 33 bp, Homo sapien
agctaagtgactccactaatctgtctcaaagca

SEQ ID NO: 1057589 - DNA, 33 bp, Homo sapien
gatcccagatagaaacacagagaagtcagaagg

SEQ ID NO: 1057590 - DNA, 33 bp, Homo sapien
gatcccagatagaaacgcagagaagtcagaagg

SEQ ID NO: 1057591 - DNA, 33 bp, Homo sapien
aattttaggttggtgaactggctcaaatctggg

SEQ ID NO: 1057592 - DNA, 33 bp, Homo sapien
aattttaggttggtgatctggctcaaatctggg

SEQ ID NO: 1057593 - DNA, 33 bp, Homo sapien
tagaagagtctggctcacagaaatctttagtgt

SEQ ID NO: 1057594 - DNA, 33 bp, Homo sapien
tagaagagtctggctcccagaaatctttagtgt

SEQ ID NO: 1057595 - DNA, 33 bp, Homo sapien
gctttgagagagacaaagaattgagagaaaaga

SEQ ID NO: 1057596 - DNA, 33 bp, Homo sapien
gctttgagagagacaatgaattgagagaaaaga

SEQ ID NO: 1057597 - DNA, 33 bp, Homo sapien
ctagtggttagaattccacaagttcaccaccat

SEQ ID NO: 1057598 - DNA, 33 bp, Homo sapien
ctagtggttagaattcgacaagttcaccaccat

SEQ ID NO: 1057599 - DNA, 33 bp, Homo sapien
aatctccaagatctcacaattcagaagtatgca

SEQ ID NO: 1057600 - DNA, 33 bp, Homo sapien
aatctccaagatctcataattcagaagtatgca

SEQ ID NO: 1057601 - DNA, 33 bp, Homo sapien
cattttgtaatgcaaacgctttttgtttctact

SEQ ID NO: 1057602 - DNA, 33 bp, Homo sapien
cattttgtaatgcaaatgctttttgtttctact

SEQ ID NO: 1057603 - DNA, 33 bp, Homo sapien
atttactgcagtgtataagtcaagggcacattc

SEQ ID NO: 1057604 - DNA, 33 bp, Homo sapien
atttactgcagtgtatgagtcaagggcacattc

SEQ ID NO: 1057605 - DNA, 33 bp, Homo sapien
cagatattcattagtcaagtggataaatgaatt

SEQ ID NO: 1057606 - DNA, 33 bp, Homo sapien
cagatattcattagtcgagtggataaatgaatt

SEQ ID NO: 1057607 - DNA, 33 bp, Homo sapien
tgtatgtggttgacataaagccatctgggagca

SEQ ID NO: 1057608 - DNA, 33 bp, Homo sapien
tgtatgtggttgacatgaagccatctgggagca

SEQ ID NO: 1057609 - DNA, 33 bp, Homo sapien
gaagtcttccaactaaataattaactggtgttg

SEQ ID NO: 1057610 - DNA, 33 bp, Homo sapien
gaagtcttccaactaagtaattaactggtgttg

SEQ ID NO: 1057611 - DNA, 33 bp, Homo sapien
atgaagccttagaagcaaaatctcgtcttttaa

SEQ ID NO: 1057612 - DNA, 33 bp, Homo sapien
atgaagccttagaagcgaaatctcgtcttttaa

SEQ ID NO: 1057613 - DNA, 33 bp, Homo sapien
tatggtaattgcctagaaagttaagtgtaactt

SEQ ID NO: 1057614 - DNA, 33 bp, Homo sapien
tatggtaattgcctagtaagttaagtgtaactt

SEQ ID NO: 1057615 - DNA, 33 bp, Homo sapien
gcaaaataaagacaaacgtttgagtggatctcc

SEQ ID NO: 1057616 - DNA, 33 bp, Homo sapien
gcaaaataaagacaaatgtttgagtggatctcc

SEQ ID NO: 1057617 - DNA, 33 bp, Homo sapien
aacatttccttgccaacgtgaattattattttc

SEQ ID NO: 1057618 - DNA, 33 bp, Homo sapien
aacatttccttgccaatgtgaattattattttc

SEQ ID NO: 1057619 - DNA, 33 bp, Homo sapien
cttccaaaggtcaacaataaaggatcctaagag

SEQ ID NO: 1057620 - DNA, 33 bp, Homo sapien
cttccaaaggtcaacagtaaaggatcctaagag

SEQ ID NO: 1057621 - DNA, 33 bp, Homo sapien
ctgaaggataaggccactagaaactccaggaga

SEQ ID NO: 1057622 - DNA, 33 bp, Homo sapien
ctgaaggataaggccagtagaaactccaggaga

SEQ ID NO: 1057623 - DNA, 33 bp, Homo sapien
ctgactactattccttaaaactctcaaagtcaa

SEQ ID NO: 1057624 - DNA, 33 bp, Homo sapien
ctgactactattcctttaaactctcaaagtcaa

SEQ ID NO: 1057625 - DNA, 33 bp, Homo sapien
tcatgatgtaatattcaaaatgttcaggatata

SEQ ID NO: 1057626 - DNA, 33 bp, Homo sapien
tcatgatgtaatattcgaaatgttcaggatata

SEQ ID NO: 1057627 - DNA, 33 bp, Homo sapien
atcaagttgatagtagaaagaatctcaggaaag

SEQ ID NO: 1057628 - DNA, 33 bp, Homo sapien
atcaagttgatagtaggaagaatctcaggaaag

SEQ ID NO: 1057629 - DNA, 33 bp, Homo sapien
actctcctacccttgaaatgactttatatcttc

SEQ ID NO: 1057630 - DNA, 33 bp, Homo sapien
actctcctacccttgagatgactttatatcttc

SEQ ID NO: 1057631 - DNA, 33 bp, Homo sapien
aatattttaggccaaactcttatcagatctgat

SEQ ID NO: 1057632 - DNA, 33 bp, Homo sapien
aatattttaggccaaattcttatcagatctgat

SEQ ID NO: 1057633 - DNA, 33 bp, Homo sapien
aaactccaaaatgtaactcacactccagggttc

SEQ ID NO: 1057634 - DNA, 33 bp, Homo sapien
aaactccaaaatgtaattcacactccagggttc

SEQ ID NO: 1057635 - DNA, 33 bp, Homo sapien
atgtaattagttaagacgaggcaattagggtgg

SEQ ID NO: 1057636 - DNA, 33 bp, Homo sapien
atgtaattagttaagatgaggcaattagggtgg

SEQ ID NO: 1057637 - DNA, 33 bp, Homo sapien
ccaggaatgaaagtacagtaaaacatgagaaac

SEQ ID NO: 1057638 - DNA, 33 bp, Homo sapien
ccaggaatgaaagtacggtaaaacatgagaaac

SEQ ID NO: 1057639 - DNA, 33 bp, Homo sapien
gtagatagcccactgacgttataaagcaactgt

SEQ ID NO: 1057640 - DNA, 33 bp, Homo sapien
gtagatagcccactgatgttataaagcaactgt

SEQ ID NO: 1057641 - DNA, 33 bp, Homo sapien
tatttataatttctgagaactcattcttaatct

SEQ ID NO: 1057642 - DNA, 33 bp, Homo sapien
tatttataatttctgataactcattcttaatct

SEQ ID NO: 1057643 - DNA, 33 bp, Homo sapien
tcataactagccaatacagtttttagaatcaat

SEQ ID NO: 1057644 - DNA, 33 bp, Homo sapien
tcataactagccaatatagtttttagaatcaat

SEQ ID NO: 1057645 - DNA, 33 bp, Homo sapien
ctctcagtctactaaaagtactcactgaaccat

SEQ ID NO: 1057646 - DNA, 33 bp, Homo sapien
ctctcagtctactaaaggtactcactgaaccat

SEQ ID NO: 1057647 - DNA, 33 bp, Homo sapien
caaacaaacaacaaaaccgtgtctgcttctacg

SEQ ID NO: 1057648 - DNA, 33 bp, Homo sapien
caaacaaacaacaaaatcgtgtctgcttctacg

SEQ ID NO: 1057649 - DNA, 33 bp, Homo sapien
tttgccacaacaagaaatgcatcgctaggactt

SEQ ID NO: 1057650 - DNA, 33 bp, Homo sapien
tttgccacaacaagaagtgcatcgctaggactt

SEQ ID NO: 1057651 - DNA, 33 bp, Homo sapien
ttatgaaagtgttagacgagaaatttaatgact

SEQ ID NO: 1057652 - DNA, 33 bp, Homo sapien
ttatgaaagtgttagatgagaaatttaatgact

SEQ ID NO: 1057653 - DNA, 33 bp, Homo sapien; identical to SEQ ID NO: 1057651

SEQ ID NO: 1057654 - DNA, 33 bp, Homo sapien; identical to SEQ ID NO: 1057652

SEQ ID NO: 1057655 - DNA, 33 bp, Homo sapien
tctcagaattaagtcactagaatattagcgcct

SEQ ID NO: 1057656 - DNA, 33 bp, Homo sapien
tctcagaattaagtcattagaatattagcgcct

SEQ ID NO: 1057657 - DNA, 33 bp, Homo sapien
tagggttaccagccaaatagacactagaggaga

SEQ ID NO: 1057658 - DNA, 33 bp, Homo sapien
tagggttaccagccaagtagacactagaggaga

SEQ ID NO: 1057659 - DNA, 33 bp, Homo sapien
aaaagagcatgctaacactgatgaaaagaatgt

SEQ ID NO: 1057660 - DNA, 33 bp, Homo sapien
aaaagagcatgctaacgctgatgaaaagaatgt

SEQ ID NO: 1057661 - DNA, 33 bp, Homo sapien
caaggacaagaaagaacagagatttaaaagaag

SEQ ID NO: 1057662 - DNA, 33 bp, Homo sapien
caaggacaagaaagaagagagatttaaaagaag

SEQ ID NO: 1057663 - DNA, 33 bp, Homo sapien
aaattagcatacaggacatttcttctatgcagg

SEQ ID NO: 1057664 - DNA, 33 bp, Homo sapien
aaattagcatacaggatatttcttctatgcagg

SEQ ID NO: 1057665 - DNA, 33 bp, Homo sapien
aagaagaagcctctacggaccaggtaggttcca

SEQ ID NO: 1057666 - DNA, 33 bp, Homo sapien
aagaagaagcctctactgaccaggtaggttcca

SEQ ID NO: 1057667 - DNA, 33 bp, Homo sapien
ggtagttgtgctcttaccaagaaaattaaactc

SEQ ID NO: 1057668 - DNA, 33 bp, Homo sapien
ggtagttgtgctcttatcaagaaaattaaactc

SEQ ID NO: 1057669 - DNA, 33 bp, Homo sapien
tcttgctctctaatcaatattttgggccaggca

SEQ ID NO: 1057670 - DNA, 33 bp, Homo sapien
tcttgctctctaatcagtattttgggccaggca

SEQ ID NO: 1057671 - DNA, 33 bp, Homo sapien
acattcatacagctccaagaggctcaggatttg

SEQ ID NO: 1057672 - DNA, 33 bp, Homo sapien
acattcatacagctcccagaggctcaggatttg

SEQ ID NO: 1057673 - DNA, 33 bp, Homo sapien
catcctcaagaagcataactctgcataagagta

SEQ ID NO: 1057674 - DNA, 33 bp, Homo sapien
catcctcaagaagcatgactctgcataagagta

SEQ ID NO: 1057675 - DNA, 33 bp, Homo sapien
aactccttgtcaccttcaactgaactgccacgt

SEQ ID NO: 1057676 - DNA, 33 bp, Homo sapien
aactccttgtcacctttaactgaactgccacgt

SEQ ID NO: 1057677 - DNA, 33 bp, Homo sapien
ttcctcaccaatgaataataggaattgagtaaa

SEQ ID NO: 1057678 - DNA, 33 bp, Homo sapien
ttcctcaccaatgaatgataggaattgagtaaa

SEQ ID NO: 1057679 - DNA, 33 bp, Homo sapien
gggttaatacttttaaagaattcctgcttctca

SEQ ID NO: 1057680 - DNA, 33 bp, Homo sapien
gggttaatacttttaaggaattcctgcttctca

SEQ ID NO: 1057681 - DNA, 33 bp, Homo sapien
ttctggagagaacatacgcagaaaagaccaagc

SEQ ID NO: 1057682 - DNA, 33 bp, Homo sapien
ttctggagagaacatatgcagaaaagaccaagc

SEQ ID NO: 1057683 - DNA, 33 bp, Homo sapien
gccaggcaagggttaaatcacgcaccaccacac

SEQ ID NO: 1057684 - DNA, 33 bp, Homo sapien
gccaggcaagggttaagtcacgcaccaccacac

SEQ ID NO: 1057685 - DNA, 33 bp, Homo sapien
gggataggccaaattaacaagtaaaaatgcatg

SEQ ID NO: 1057686 - DNA, 33 bp, Homo sapien
gggataggccaaattagcaagtaaaaatgcatg

SEQ ID NO: 1057687 - DNA, 33 bp, Homo sapien
taaatgtgacaactccagaaactaaacagtagc

SEQ ID NO: 1057688 - DNA, 33 bp, Homo sapien
taaatgtgacaactccggaaactaaacagtagc

SEQ ID NO: 1057689 - DNA, 33 bp, Homo sapien
ttcatttctccatatacgatttatccttcctat

SEQ ID NO: 1057690 - DNA, 33 bp, Homo sapien
ttcatttctccatatatgatttatccttcctat

SEQ ID NO: 1057691 - DNA, 33 bp, Homo sapien
caggtacagaggaaataaagcattccaaataat

SEQ ID NO: 1057692 - DNA, 33 bp, Homo sapien
caggtacagaggaaatgaagcattccaaataat

SEQ ID NO: 1057693 - DNA, 33 bp, Homo sapien
gtaatacctaccactaaggtgttgtgagaatta

SEQ ID NO: 1057694 - DNA, 33 bp, Homo sapien
gtaatacctaccactacggtgttgtgagaatta

SEQ ID NO: 1057695 - DNA, 33 bp, Homo sapien
aaagggcagctcttaaaataaacagctgtaacc

SEQ ID NO: 1057696 - DNA, 33 bp, Homo sapien
aaagggcagctcttaagataaacagctgtaacc

SEQ ID NO: 1057697 - DNA, 33 bp, Homo sapien
aatcctacctcttaaccactgtaaaataaacac

SEQ ID NO: 1057698 - DNA, 33 bp, Homo sapien
aatcctacctcttaactactgtaaaataaacac

SEQ ID NO: 1057699 - DNA, 33 bp, Homo sapien
atgatgggaattccacaaaaaagcggcaattaa

SEQ ID NO: 1057700 - DNA, 33 bp, Homo sapien
atgatgggaattccacgaaaaagcggcaattaa

SEQ ID NO: 1057701 - DNA, 33 bp, Homo sapien
tgtctttctcgggggaaggtgcactcttcttga

SEQ ID NO: 1057702 - DNA, 33 bp, Homo sapien
tgtctttctcgggggagggtgcactcttcttga

SEQ ID NO: 1057703 - DNA, 33 bp, Homo sapien
acaaccagttcacatcaactgtcactttgagac

SEQ ID NO: 1057704 - DNA, 33 bp, Homo sapien
acaaccagttcacatctactgtcactttgagac

SEQ ID NO: 1057705 - DNA, 33 bp, Homo sapien
ggctaagaaatcagaacgtgcctttagaaataa

SEQ ID NO: 1057706 - DNA, 33 bp, Homo sapien
ggctaagaaatcagaatgtgcctttagaaataa

SEQ ID NO: 1057707 - DNA, 33 bp, Homo sapien
ctaaagggtatgcaatgacagaggactagtaac

SEQ ID NO: 1057708 - DNA, 33 bp, Homo sapien
ctaaagggtatgcaattacagaggactagtaac

SEQ ID NO: 1057709 - DNA, 33 bp, Homo sapien
tgcctaagaggtgtaacgtataggaaccaatac

SEQ ID NO: 1057710 - DNA, 33 bp, Homo sapien
tgcctaagaggtgtaatgtataggaaccaatac

SEQ ID NO: 1057711 - DNA, 33 bp, Homo sapien
ggttgagtgtggaaggcaatgagggaaagtggt

SEQ ID NO: 1057712 - DNA, 33 bp, Homo sapien
ggttgagtgtggaagggaatgagggaaagtggt

SEQ ID NO: 1057713 - DNA, 33 bp, Homo sapien
actgacggtgggagtcaagaggtatgagtgctt

SEQ ID NO: 1057714 - DNA, 33 bp, Homo sapien
actgacggtgggagtcgagaggtatgagtgctt

SEQ ID NO: 1057715 - DNA, 33 bp, Homo sapien
gaagaaagatggtgtcacttttgctatttgcca

SEQ ID NO: 1057716 - DNA, 33 bp, Homo sapien
gaagaaagatggtgtcgcttttgctatttgcca

SEQ ID NO: 1057717 - DNA, 33 bp, Homo sapien
ctgttctggtgataatgaatggatctcacaaga

SEQ ID NO: 1057718 - DNA, 33 bp, Homo sapien
ctgttctggtgataattaatggatctcacaaga

SEQ ID NO: 1057719 - DNA, 33 bp, Homo sapien
aaattggaagagctcacacatagccttaagtgg

SEQ ID NO: 1057720 - DNA, 33 bp, Homo sapien
aaattggaagagctcagacatagccttaagtgg

SEQ ID NO: 1057721 - DNA, 33 bp, Homo sapien
cccaattgagtagtacacttgttgaatatgtgc

SEQ ID NO: 1057722 - DNA, 33 bp, Homo sapien
cccaattgagtagtacgcttgttgaatatgtgc

SEQ ID NO: 1057723 - DNA, 33 bp, Homo sapien
gaatcatctcgacaacaaatggaggacaggtac

SEQ ID NO: 1057724 - DNA, 33 bp, Homo sapien
gaatcatctcgacaacgaatggaggacaggtac

SEQ ID NO: 1057725 - DNA, 33 bp, Homo sapien
tgctgacaatggttggaataaatgatattgtct

SEQ ID NO: 1057726 - DNA, 33 bp, Homo sapien
tgctgacaatggttgggataaatgatattgtct

SEQ ID NO: 1057727 - DNA, 33 bp, Homo sapien
ttgctctcaatgtgcaccttgatttggttcttt

SEQ ID NO: 1057728 - DNA, 33 bp, Homo sapien
ttgctctcaatgtgcatcttgatttggttcttt

SEQ ID NO: 1057729 - DNA, 33 bp, Homo sapien
gtaagtggggtaaggaagaaatgtctaagttta

SEQ ID NO: 1057730 - DNA, 33 bp, Homo sapien
gtaagtggggtaaggaggaaatgtctaagttta

SEQ ID NO: 1057731 - DNA, 33 bp, Homo sapien
ttgtcctttgtcaaaacgtattgaactctgcat

SEQ ID NO: 1057732 - DNA, 33 bp, Homo sapien
ttgtcctttgtcaaaatgtattgaactctgcat

SEQ ID NO: 1057733 - DNA, 33 bp, Homo sapien
tcatcttcaagaaaaacagctgggagataaagg

SEQ ID NO: 1057734 - DNA, 33 bp, Homo sapien
tcatcttcaagaaaaagagctgggagataaagg

SEQ ID NO: 1057735 - DNA, 33 bp, Homo sapien
attggtatgttggtaacgtagagaaacaacttg

SEQ ID NO: 1057736 - DNA, 33 bp, Homo sapien
attggtatgttggtaatgtagagaaacaacttg

SEQ ID NO: 1057737 - DNA, 33 bp, Homo sapien
ttctgtgagacaacaacccaaaacttttcaaca

SEQ ID NO: 1057738 - DNA, 33 bp, Homo sapien
ttctgtgagacaacaatccaaaacttttcaaca

SEQ ID NO: 1057739 - DNA, 33 bp, Homo sapien
gtggagctaataccacgctatctgccttacagg

SEQ ID NO: 1057740 - DNA, 33 bp, Homo sapien
gtggagctaataccactctatctgccttacagg

SEQ ID NO: 1057741 - DNA, 33 bp, Homo sapien
actatgaaactgcatacgtctacttccttctgg

SEQ ID NO: 1057742 - DNA, 33 bp, Homo sapien
actatgaaactgcatatgtctacttccttctgg

SEQ ID NO: 1057743 - DNA, 33 bp, Homo sapien
accctggccttcgtcaatcactggatatgagcc

SEQ ID NO: 1057744 - DNA, 33 bp, Homo sapien
accctggccttcgtcagtcactggatatgagcc

SEQ ID NO: 1057745 - DNA, 33 bp, Homo sapien
cggtcatgaatcaaacagatacaaactgatctt

SEQ ID NO: 1057746 - DNA, 33 bp, Homo sapien
cggtcatgaatcaaacggatacaaactgatctt

SEQ ID NO: 1057747 - DNA, 33 bp, Homo sapien
gcatgactatctgaaccggtaagggccacagga

SEQ ID NO: 1057748 - DNA, 33 bp, Homo sapien
gcatgactatctgaactggtaagggccacagga

SEQ ID NO: 1057749 - DNA, 33 bp, Homo sapien
tctggaaagactggacaaaatgatggaggagta

SEQ ID NO: 1057750 - DNA, 33 bp, Homo sapien
tctggaaagactggacgaaatgatggaggagta

SEQ ID NO: 1057751 - DNA, 33 bp, Homo sapien
ggctaaatgggtctgacgccattctattagtgc

SEQ ID NO: 1057752 - DNA, 33 bp, Homo sapien
ggctaaatgggtctgatgccattctattagtgc

SEQ ID NO: 1057753 - DNA, 33 bp, Homo sapien
tggcattttagaacacaaagggacagcagatgc

SEQ ID NO: 1057754 - DNA, 33 bp, Homo sapien
tggcattttagaacacgaagggacagcagatgc

SEQ ID NO: 1057755 - DNA, 33 bp, Homo sapien
tatttcatcctctgaaagtggaccccaagaaag

SEQ ID NO: 1057756 - DNA, 33 bp, Homo sapien
tatttcatcctctgaacgtggaccccaagaaag

SEQ ID NO: 1057757 - DNA, 33 bp, Homo sapien
ggttatcagcaatataaggacacgtatttttat

SEQ ID NO: 1057758 - DNA, 33 bp, Homo sapien
ggttatcagcaatatagggacacgtatttttat

SEQ ID NO: 1057759 - DNA, 33 bp, Homo sapien
ccacagtgtcatacacaaagaggaaatgacagc

SEQ ID NO: 1057760 - DNA, 33 bp, Homo sapien
ccacagtgtcatacacgaagaggaaatgacagc

SEQ ID NO: 1057761 - DNA, 33 bp, Homo sapien
ttttcaagcttttctacgaggctccctgctctg

SEQ ID NO: 1057762 - DNA, 33 bp, Homo sapien
ttttcaagcttttctaggaggctccctgctctg

SEQ ID NO: 1057763 - DNA, 33 bp, Homo sapien
ttttattcttaccaaaagagtggaaatgctgca

SEQ ID NO: 1057764 - DNA, 33 bp, Homo sapien
ttttattcttaccaaaggagtggaaatgctgca

SEQ ID NO: 1057765 - DNA, 33 bp, Homo sapien
atgtccataatggatacgtgtataatctctttt

SEQ ID NO: 1057766 - DNA, 33 bp, Homo sapien
atgtccataatggatatgtgtataatctctttt

SEQ ID NO: 1057767 - DNA, 33 bp, Homo sapien
ttttgatcacaaaacagtcaatggaaatagatc

SEQ ID NO: 1057768 - DNA, 33 bp, Homo sapien
ttttgatcacaaaacattcaatggaaatagatc

SEQ ID NO: 1057769 - DNA, 33 bp, Homo sapien
acctgcagatttgtcacgaatttaaacgaaatt

SEQ ID NO: 1057770 - DNA, 33 bp, Homo sapien
acctgcagatttgtcatgaatttaaacgaaatt

SEQ ID NO: 1057771 - DNA, 33 bp, Homo sapien
gctttatttacactaacccaaacagcctaactg

SEQ ID NO: 1057772 - DNA, 33 bp, Homo sapien
gctttatttacactaatccaaacagcctaactg

SEQ ID NO: 1057773 - DNA, 33 bp, Homo sapien
acccttcttactccacaggaggttctacagagt

SEQ ID NO: 1057774 - DNA, 33 bp, Homo sapien
acccttcttactccacgggaggttctacagagt

SEQ ID NO: 1057775 - DNA, 33 bp, Homo sapien
gcactctctttcacaaaaggatgatatacggcc

SEQ ID NO: 1057776 - DNA, 33 bp, Homo sapien
gcactctctttcacaataggatgatatacggcc

SEQ ID NO: 1057777 - DNA, 33 bp, Homo sapien
ctgatggatcttacccagaagccctacatgtga

SEQ ID NO: 1057778 - DNA, 33 bp, Homo sapien
ctgatggatcttaccctgaagccctacatgtga

SEQ ID NO: 1057779 - DNA, 33 bp, Homo sapien
gttcagagactgagataacttcgaagcaagttc

SEQ ID NO: 1057780 - DNA, 33 bp, Homo sapien
gttcagagactgagatgacttcgaagcaagttc

SEQ ID NO: 1057781 - DNA, 33 bp, Homo sapien
tgtttctgcaattacaaagtttcagaggtttaa

SEQ ID NO: 1057782 - DNA, 33 bp, Homo sapien
tgtttctgcaattacagagtttcagaggtttaa

SEQ ID NO: 1057783 - DNA, 33 bp, Homo sapien
ctgttatgggaagttgcaaacccagcaactatt

SEQ ID NO: 1057784 - DNA, 33 bp, Homo sapien
ctgttatgggaagttgtaaacccagcaactatt

SEQ ID NO: 1057785 - DNA, 33 bp, Homo sapien
atatatcaaggccgagcagctgtacattggagt

SEQ ID NO: 1057786 - DNA, 33 bp, Homo sapien
atatatcaaggccgaggagctgtacattggagt

SEQ ID NO: 1057787 - DNA, 33 bp, Homo sapien
tcaacaagagttagaaatggcctcaagccctta

SEQ ID NO: 1057788 - DNA, 33 bp, Homo sapien
tcaacaagagttagaagtggcctcaagccctta

SEQ ID NO: 1057789 - DNA, 33 bp, Homo sapien
tttgtcaccaagaagaacttccctggccttttc

SEQ ID NO: 1057790 - DNA, 33 bp, Homo sapien
tttgtcaccaagaagagcttccctggccttttc

SEQ ID NO: 1057791 - DNA, 33 bp, Homo sapien
aaatcggaacaaacaaatcttgctattataagt

SEQ ID NO: 1057792 - DNA, 33 bp, Homo sapien
aaatcggaacaaacaagtcttgctattataagt

SEQ ID NO: 1057793 - DNA, 33 bp, Homo sapien
gaggggcgacctaaaaaacaaaatacactcatt

SEQ ID NO: 1057794 - DNA, 33 bp, Homo sapien
gaggggcgacctaaaacacaaaatacactcatt

SEQ ID NO: 1057795 - DNA, 33 bp, Homo sapien
tcagtaattcaaaagcacaaagaaaagatggca

SEQ ID NO: 1057796 - DNA, 33 bp, Homo sapien
tcagtaattcaaaagcgcaaagaaaagatggca

SEQ ID NO: 1057797 - DNA, 33 bp, Homo sapien; identical to SEQ ID NO: 1057795

SEQ ID NO: 1057798 - DNA, 33 bp, Homo sapien; identical to SEQ ID NO: 1057796

SEQ ID NO: 1057799 - DNA, 33 bp, Homo sapien
gccaagtagaccagaactgaaaatagttttaat

SEQ ID NO: 1057800 - DNA, 33 bp, Homo sapien
gccaagtagaccagaattgaaaatagttttaat

SEQ ID NO: 1057801 - DNA, 33 bp, Homo sapien
acacttagtggtaagaatcttaaaattatagcc

SEQ ID NO: 1057802 - DNA, 33 bp, Homo sapien
acacttagtggtaagagtcttaaaattatagcc

SEQ ID NO: 1057803 - DNA, 33 bp, Homo sapien
acacataaaatttcacaacacatatgtaaagct

SEQ ID NO: 1057804 - DNA, 33 bp, Homo sapien
acacataaaatttcacgacacatatgtaaagct

SEQ ID NO: 1057805 - DNA, 33 bp, Homo sapien
gcaattggcatcactgaacttaaaaaaaagtgt

SEQ ID NO: 1057806 - DNA, 33 bp, Homo sapien
gcaattggcatcactggacttaaaaaaaagtgt

SEQ ID NO: 1057807 - DNA, 33 bp, Homo sapien
ttaaaaagcaaaaatacacgcagaaccttgcag

SEQ ID NO: 1057808 - DNA, 33 bp, Homo sapien
ttaaaaagcaaaaatatacgcagaaccttgcag

SEQ ID NO: 1057809 - DNA, 33 bp, Homo sapien
gggagaatgacaaaatgaatgtggtaaaatata

SEQ ID NO: 1057810 - DNA, 33 bp, Homo sapien
gggagaatgacaaaattaatgtggtaaaatata

SEQ ID NO: 1057811 - DNA, 33 bp, Homo sapien
tatcttttacattttacagttaagttgcagata

SEQ ID NO: 1057812 - DNA, 33 bp, Homo sapien
tatcttttacattttagagttaagttgcagata

SEQ ID NO: 1057813 - DNA, 33 bp, Homo sapien
gaagaaattctccaaccgggcaaatatttcctt

SEQ ID NO: 1057814 - DNA, 33 bp, Homo sapien
gaagaaattctccaactgggcaaatatttcctt

SEQ ID NO: 1057815 - DNA, 33 bp, Homo sapien
ttctgttaatatggtaacttacattgattgatt

SEQ ID NO: 1057816 - DNA, 33 bp, Homo sapien
ttctgttaatatggtaccttacattgattgatt

SEQ ID NO: 1057817 - DNA, 33 bp, Homo sapien
tccagttccttggctacaatactttacttctgt

SEQ ID NO: 1057818 - DNA, 33 bp, Homo sapien
tccagttccttggctataatactttacttctgt

SEQ ID NO: 1057819 - DNA, 33 bp, Homo sapien
ttcgatttttaaagtgaactttggaatttgaac

SEQ ID NO: 1057820 - DNA, 33 bp, Homo sapien
ttcgatttttaaagtggactttggaatttgaac

SEQ ID NO: 1057821 - DNA, 33 bp, Homo sapien
aacgttgcccatagaaaaaactaatgtgaaaca

SEQ ID NO: 1057822 - DNA, 33 bp, Homo sapien
aacgttgcccatagaagaaactaatgtgaaaca

SEQ ID NO: 1057823 - DNA, 33 bp, Homo sapien
ttgtgtcctgtctttcccacacttaggcatttc

SEQ ID NO: 1057824 - DNA, 33 bp, Homo sapien
ttgtgtcctgtctttctcacacttaggcatttc

SEQ ID NO: 1057825 - DNA, 33 bp, Homo sapien
gagagagagaccaagacgagggaacgagcagtc

SEQ ID NO: 1057826 - DNA, 33 bp, Homo sapien
gagagagagaccaagatgagggaacgagcagtc

SEQ ID NO: 1057827 - DNA, 33 bp, Homo sapien
atctccctcctacctaccgttcatagtcacatc

SEQ ID NO: 1057828 - DNA, 33 bp, Homo sapien
atctccctcctacctatcgttcatagtcacatc

SEQ ID NO: 1057829 - DNA, 33 bp, Homo sapien
cccatagtgccgcaacagaagtgtgaaaagagt

SEQ ID NO: 1057830 - DNA, 33 bp, Homo sapien
cccatagtgccgcaacggaagtgtgaaaagagt

SEQ ID NO: 1057831 - DNA, 33 bp, Homo sapien
aagtccaatagctttccctgcaaaattctacgt

SEQ ID NO: 1057832 - DNA, 33 bp, Homo sapien
aagtccaatagctttctctgcaaaattctacgt

SEQ ID NO: 1057833 - DNA, 33 bp, Homo sapien
aaactgcttacacataactaaatgtaaagtcaa

SEQ ID NO: 1057834 - DNA, 33 bp, Homo sapien
aaactgcttacacatagctaaatgtaaagtcaa

SEQ ID NO: 1057835 - DNA, 33 bp, Homo sapien
ccctcactcttcagaacgctccctcaataatca

SEQ ID NO: 1057836 - DNA, 33 bp, Homo sapien
ccctcactcttcagaatgctccctcaataatca

SEQ ID NO: 1057837 - DNA, 33 bp, Homo sapien
ctgctgaaaagacaaaatggtagtacaggcatt

SEQ ID NO: 1057838 - DNA, 33 bp, Homo sapien
ctgctgaaaagacaaagtggtagtacaggcatt

SEQ ID NO: 1057839 - DNA, 33 bp, Homo sapien
gtggcctagctccacaatctttcactctttctt

SEQ ID NO: 1057840 - DNA, 33 bp, Homo sapien
gtggcctagctccacagtctttcactctttctt

SEQ ID NO: 1057841 - DNA, 33 bp, Homo sapien
caaagctgcgtccaagaaactggctctgttgac

SEQ ID NO: 1057842 - DNA, 33 bp, Homo sapien
caaagctgcgtccaaggaactggctctgttgac

SEQ ID NO: 1057843 - DNA, 33 bp, Homo sapien
ttataataattgactaaatagaactagccaaga

SEQ ID NO: 1057844 - DNA, 33 bp, Homo sapien
ttataataattgactacatagaactagccaaga

SEQ ID NO: 1057845 - DNA, 33 bp, Homo sapien
tcattgtgtactcacaagaaactccccttgatt

SEQ ID NO: 1057846 - DNA, 33 bp, Homo sapien
tcattgtgtactcacatgaaactccccttgatt

SEQ ID NO: 1057847 - DNA, 33 bp, Homo sapien
tttttcttatacctaaccccaaccttctcgacc

SEQ ID NO: 1057848 - DNA, 33 bp, Homo sapien
tttttcttatacctaatcccaaccttctcgacc

SEQ ID NO: 1057849 - DNA, 33 bp, Homo sapien
tgaccgatactccgaaatcaatcaccggattga

SEQ ID NO: 1057850 - DNA, 33 bp, Homo sapien
tgaccgatactccgaactcaatcaccggattga

SEQ ID NO: 1057851 - DNA, 33 bp, Homo sapien
gcaatggttagaagacagtcccttcaataagac

SEQ ID NO: 1057852 - DNA, 33 bp, Homo sapien
gcaatggttagaagaccgtcccttcaataagac

SEQ ID NO: 1057853 - DNA, 33 bp, Homo sapien
tggtgcagaggtgcggcatttattcatgatatg

SEQ ID NO: 1057854 - DNA, 33 bp, Homo sapien
tggtgcagaggtgcggtatttattcatgatatg

SEQ ID NO: 1057855 - DNA, 33 bp, Homo sapien
ctatagatgttcataactcaaatctccacaagt

SEQ ID NO: 1057856 - DNA, 33 bp, Homo sapien
ctatagatgttcataattcaaatctccacaagt

SEQ ID NO: 1057857 - DNA, 33 bp, Homo sapien
cattgcagacctgatgcaggctctttggcattt

SEQ ID NO: 1057858 - DNA, 33 bp, Homo sapien
cattgcagacctgatgtaggctctttggcattt

SEQ ID NO: 1057859 - DNA, 33 bp, Homo sapien
cagcacttttctttcaggaccttataaaccttt

SEQ ID NO: 1057860 - DNA, 33 bp, Homo sapien
cagcacttttctttcatgaccttataaaccttt

SEQ ID NO: 1057861 - DNA, 33 bp, Homo sapien
tgatgagcttggccgcaagactggcacttggta

SEQ ID NO: 1057862 - DNA, 33 bp, Homo sapien
tgatgagcttggccgcgagactggcacttggta

SEQ ID NO: 1057863 - DNA, 33 bp, Homo sapien
attgatgtggactcaaaccagtggcaatgcttt

SEQ ID NO: 1057864 - DNA, 33 bp, Homo sapien
attgatgtggactcaagccagtggcaatgcttt

SEQ ID NO: 1057865 - DNA, 33 bp, Homo sapien
ttctttttgatttacgccatgccaaatgataag

SEQ ID NO: 1057866 - DNA, 33 bp, Homo sapien
ttctttttgatttacgtcatgccaaatgataag

SEQ ID NO: 1057867 - DNA, 33 bp, Homo sapien
tacaaaaagtcacgacaaactttcaacggagga

SEQ ID NO: 1057868 - DNA, 33 bp, Homo sapien
tacaaaaagtcacgacgaactttcaacggagga

SEQ ID NO: 1057869 - DNA, 33 bp, Homo sapien
ggttgcctaaagctgacgatagaggggaattaa

SEQ ID NO: 1057870 - DNA, 33 bp, Homo sapien
ggttgcctaaagctgatgatagaggggaattaa

SEQ ID NO: 1057871 - DNA, 33 bp, Homo sapien
gctcttataaataaacaccaaggcaaatgttta

SEQ ID NO: 1057872 - DNA, 33 bp, Homo sapien
gctcttataaataaacgccaaggcaaatgttta

SEQ ID NO: 1057873 - DNA, 33 bp, Homo sapien
gtcaggaccatcgtgaacataggagttgaaggc

SEQ ID NO: 1057874 - DNA, 33 bp, Homo sapien
gtcaggaccatcgtgagcataggagttgaaggc

SEQ ID NO: 1057875 - DNA, 33 bp, Homo sapien
atccaacaggacaagtaaaagttaaatttggtt

SEQ ID NO: 1057876 - DNA, 33 bp, Homo sapien
atccaacaggacaagtgaaagttaaatttggtt

SEQ ID NO: 1057877 - DNA, 33 bp, Homo sapien
atgttgccagctcagactaagcgcttggtgaat

SEQ ID NO: 1057878 - DNA, 33 bp, Homo sapien
atgttgccagctcagagtaagcgcttggtgaat

SEQ ID NO: 1057879 - DNA, 33 bp, Homo sapien
tttaggagtagccggtcaaatcagacatagaat

SEQ ID NO: 1057880 - DNA, 33 bp, Homo sapien
tttaggagtagccggtgaaatcagacatagaat

SEQ ID NO: 1057881 - DNA, 33 bp, Homo sapien
ggacaaagaggctctcaaatttacctagctcag

SEQ ID NO: 1057882 - DNA, 33 bp, Homo sapien
ggacaaagaggctctcgaatttacctagctcag

SEQ ID NO: 1057883 - DNA, 33 bp, Homo sapien
cattatgaaaatgtaaatgagaaaaattcaaca

SEQ ID NO: 1057884 - DNA, 33 bp, Homo sapien
cattatgaaaatgtaagtgagaaaaattcaaca

SEQ ID NO: 1057885 - DNA, 33 bp, Homo sapien
agggagaggtgggaagaatatgtgtccttgaca

SEQ ID NO: 1057886 - DNA, 33 bp, Homo sapien
agggagaggtgggaagcatatgtgtccttgaca

SEQ ID NO: 1057887 - DNA, 33 bp, Homo sapien
catgggggcattcaccaaagggatgaacaagtg

SEQ ID NO: 1057888 - DNA, 33 bp, Homo sapien
catgggggcattcaccgaagggatgaacaagtg

SEQ ID NO: 1057889 - DNA, 33 bp, Homo sapien
gattacaatggccaaacaaatatgtccagagaa

SEQ ID NO: 1057890 - DNA, 33 bp, Homo sapien
gattacaatggccaaagaaatatgtccagagaa

SEQ ID NO: 1057891 - DNA, 33 bp, Homo sapien
tttcaatggagaaaaaatgtcaatatctatcaa

SEQ ID NO: 1057892 - DNA, 33 bp, Homo sapien
tttcaatggagaaaaagtgtcaatatctatcaa

SEQ ID NO: 1057893 - DNA, 33 bp, Homo sapien
tacacttaacaaacacggtaacaagattcccac

SEQ ID NO: 1057894 - DNA, 33 bp, Homo sapien
tacacttaacaaacactgtaacaagattcccac

SEQ ID NO: 1057895 - DNA, 33 bp, Homo sapien
taagtcaagaataaaacccaaacggatcagaaa

SEQ ID NO: 1057896 - DNA, 33 bp, Homo sapien
taagtcaagaataaaatccaaacggatcagaaa

SEQ ID NO: 1057897 - DNA, 33 bp, Homo sapien
tagcaatgaaaaatgacgttaatttgtggttct

SEQ ID NO: 1057898 - DNA, 33 bp, Homo sapien
tagcaatgaaaaatgatgttaatttgtggttct

SEQ ID NO: 1057899 - DNA, 33 bp, Homo sapien
tttttttttgaagttacgctatcattcagttca

SEQ ID NO: 1057900 - DNA, 33 bp, Homo sapien
tttttttttgaagttaggctatcattcagttca

SEQ ID NO: 1057901 - DNA, 33 bp, Homo sapien
attagctattccaagacgaaagacaaaaagaat

SEQ ID NO: 1057902 - DNA, 33 bp, Homo sapien
attagctattccaagatgaaagacaaaaagaat

SEQ ID NO: 1057903 - DNA, 33 bp, Homo sapien
caagctttattggacacgtgttatacttgtttc

SEQ ID NO: 1057904 - DNA, 33 bp, Homo sapien
caagctttattggacatgtgttatacttgtttc

SEQ ID NO: 1057905 - DNA, 33 bp, Homo sapien
tcagggtgtcctcaagacaaaggcagccatcag

SEQ ID NO: 1057906 - DNA, 33 bp, Homo sapien
tcagggtgtcctcaaggcaaaggcagccatcag

SEQ ID NO: 1057907 - DNA, 33 bp, Homo sapien
cacatggagagccatacgtggagaaaaaaacca

SEQ ID NO: 1057908 - DNA, 33 bp, Homo sapien
cacatggagagccatatgtggagaaaaaaacca

SEQ ID NO: 1057909 - DNA, 33 bp, Homo sapien
aaagtaattgactgtccaagggccatgtactga

SEQ ID NO: 1057910 - DNA, 33 bp, Homo sapien
aaagtaattgactgtctaagggccatgtactga

SEQ ID NO: 1057911 - DNA, 33 bp, Homo sapien
aactgatcagcctaagacaacggtaacagagag

SEQ ID NO: 1057912 - DNA, 33 bp, Homo sapien
aactgatcagcctaagccaacggtaacagagag

SEQ ID NO: 1057913 - DNA, 33 bp, Homo sapien
aagtgaacatgacacaatgcatatgttacaggt

SEQ ID NO: 1057914 - DNA, 33 bp, Homo sapien
aagtgaacatgacacagtgcatatgttacaggt

SEQ ID NO: 1057915 - DNA, 33 bp, Homo sapien
ttgaagaggcttaatgaacacaaagcattaatc

SEQ ID NO: 1057916 - DNA, 33 bp, Homo sapien
ttgaagaggcttaatggacacaaagcattaatc

SEQ ID NO: 1057917 - DNA, 33 bp, Homo sapien
agtggagaattatgacaagctttagcacacctg

SEQ ID NO: 1057918 - DNA, 33 bp, Homo sapien
agtggagaattatgacgagctttagcacacctg

SEQ ID NO: 1057919 - DNA, 33 bp, Homo sapien
tgattgttcatgaagacgccatgtgtatccccc

SEQ ID NO: 1057920 - DNA, 33 bp, Homo sapien
tgattgttcatgaagatgccatgtgtatccccc

SEQ ID NO: 1057921 - DNA, 33 bp, Homo sapien
gagggagttaaattcaatatggcaatatgtatt

SEQ ID NO: 1057922 - DNA, 33 bp, Homo sapien
gagggagttaaattcactatggcaatatgtatt

SEQ ID NO: 1057923 - DNA, 33 bp, Homo sapien
tacttaggtacatctaaagacatggaaagccaa

SEQ ID NO: 1057924 - DNA, 33 bp, Homo sapien
tacttaggtacatctacagacatggaaagccaa

SEQ ID NO: 1057925 - DNA, 33 bp, Homo sapien
tgttttacgtcaaaaactaatggctgccttgtg

SEQ ID NO: 1057926 - DNA, 33 bp, Homo sapien
tgttttacgtcaaaaagtaatggctgccttgtg

SEQ ID NO: 1057927 - DNA, 33 bp, Homo sapien
agacacaatggttgtacgggcatttggtaaaca

SEQ ID NO: 1057928 - DNA, 33 bp, Homo sapien
agacacaatggttgtatgggcatttggtaaaca

SEQ ID NO: 1057929 - DNA, 33 bp, Homo sapien
actggcccagggcaccactatcttgagactcct

SEQ ID NO: 1057930 - DNA, 33 bp, Homo sapien
actggcccagggcaccgctatcttgagactcct

SEQ ID NO: 1057931 - DNA, 33 bp, Homo sapien
tgaatataagaacgcacaatggagttgctagcc

SEQ ID NO: 1057932 - DNA, 33 bp, Homo sapien
tgaatataagaacgcagaatggagttgctagcc

SEQ ID NO: 1057933 - DNA, 33 bp, Homo sapien
ttgttcataatactaacgtaccattggccaaag

SEQ ID NO: 1057934 - DNA, 33 bp, Homo sapien
ttgttcataatactaatgtaccattggccaaag

SEQ ID NO: 1057935 - DNA, 33 bp, Homo sapien
ttgattcctatttgtcacctttgttaataacaa

SEQ ID NO: 1057936 - DNA, 33 bp, Homo sapien
ttgattcctatttgtcccctttgttaataacaa

SEQ ID NO: 1057937 - DNA, 33 bp, Homo sapien
acaccactgcttccaactctgtacagctgaggt

SEQ ID NO: 1057938 - DNA, 33 bp, Homo sapien
acaccactgcttccaattctgtacagctgaggt

SEQ ID NO: 1057939 - DNA, 33 bp, Homo sapien
acttctcagaacattcaatctgcagtatgtgcc

SEQ ID NO: 1057940 - DNA, 33 bp, Homo sapien
acttctcagaacattcgatctgcagtatgtgcc

SEQ ID NO: 1057941 - DNA, 33 bp, Homo sapien
catcccaattttaacaggctcaaacacgaatct

SEQ ID NO: 1057942 - DNA, 33 bp, Homo sapien
catcccaattttaacatgctcaaacacgaatct

SEQ ID NO: 1057943 - DNA, 33 bp, Homo sapien
aatctgtggaaaagagaagattcgtgtttgagc

SEQ ID NO: 1057944 - DNA, 33 bp, Homo sapien
aatctgtggaaaagagcagattcgtgtttgagc

SEQ ID NO: 1057945 - DNA, 33 bp, Homo sapien
acaaaaccaaataacaccaggagactaactgac

SEQ ID NO: 1057946 - DNA, 33 bp, Homo sapien
acaaaaccaaataacagcaggagactaactgac

SEQ ID NO: 1057947 - DNA, 33 bp, Homo sapien
gctggagtaggctcaacaaagtgattaccatta

SEQ ID NO: 1057948 - DNA, 33 bp, Homo sapien
gctggagtaggctcaataaagtgattaccatta

SEQ ID NO: 1057949 - DNA, 33 bp, Homo sapien
tcttatctgtcaaacacccacttcttcaccttt

SEQ ID NO: 1057950 - DNA, 33 bp, Homo sapien
tcttatctgtcaaacatccacttcttcaccttt

SEQ ID NO: 1057951 - DNA, 33 bp, Homo sapien
caatggaaaagtcttaactcatgacaagctggt

SEQ ID NO: 1057952 - DNA, 33 bp, Homo sapien
caatggaaaagtcttatctcatgacaagctggt

SEQ ID NO: 1057953 - DNA, 33 bp, Homo sapien
tagaacaccagatagacgttttagatttttgac

SEQ ID NO: 1057954 - DNA, 33 bp, Homo sapien
tagaacaccagatagatgttttagatttttgac

SEQ ID NO: 1057955 - DNA, 33 bp, Homo sapien
tttgaaatgcttcataagggaaaaatgagttta

SEQ ID NO: 1057956 - DNA, 33 bp, Homo sapien
tttgaaatgcttcataggggaaaaatgagttta

SEQ ID NO: 1057957 - DNA, 33 bp, Homo sapien
gttgcttgtctccataggggtggttttaggtac

SEQ ID NO: 1057958 - DNA, 33 bp, Homo sapien
gttgcttgtctccatatgggtggttttaggtac

SEQ ID NO: 1057959 - DNA, 33 bp, Homo sapien
cacaaggaggcatagaaacctactgcttgacaa

SEQ ID NO: 1057960 - DNA, 33 bp, Homo sapien
cacaaggaggcatagagacctactgcttgacaa

SEQ ID NO: 1057961 - DNA, 33 bp, Homo sapien
tcacattcattcagctaacaaccttgaacaaat

SEQ ID NO: 1057962 - DNA, 33 bp, Homo sapien
tcacattcattcagctgacaaccttgaacaaat

SEQ ID NO: 1057963 - DNA, 33 bp, Homo sapien
cttcctacctataacagtaactatggatcacaa

SEQ ID NO: 1057964 - DNA, 33 bp, Homo sapien
cttcctacctataacattaactatggatcacaa

SEQ ID NO: 1057965 - DNA, 33 bp, Homo sapien
tacacatagtttataacggaaagtaagccatga

SEQ ID NO: 1057966 - DNA, 33 bp, Homo sapien
tacacatagtttataatggaaagtaagccatga

SEQ ID NO: 1057967 - DNA, 33 bp, Homo sapien
gaatcacactgtggtcagaacagaggctcagag

SEQ ID NO: 1057968 - DNA, 33 bp, Homo sapien
gaatcacactgtggtcggaacagaggctcagag

SEQ ID NO: 1057969 - DNA, 33 bp, Homo sapien
aggagtttctaaatgccctcagtgtcagtttat

SEQ ID NO: 1057970 - DNA, 33 bp, Homo sapien
aggagtttctaaatgctctcagtgtcagtttat

SEQ ID NO: 1057971 - DNA, 33 bp, Homo sapien
acctggtctcttaaccactaacccagattggaa

SEQ ID NO: 1057972 - DNA, 33 bp, Homo sapien
acctggtctcttaaccgctaacccagattggaa

SEQ ID NO: 1057973 - DNA, 33 bp, Homo sapien
tgacatggagcagggaatacctttgataagcaa

SEQ ID NO: 1057974 - DNA, 33 bp, Homo sapien
tgacatggagcagggattacctttgataagcaa

SEQ ID NO: 1057975 - DNA, 33 bp, Homo sapien
cataaagaaagaattaaggcaatctctatgagt

SEQ ID NO: 1057976 - DNA, 33 bp, Homo sapien
cataaagaaagaattagggcaatctctatgagt

SEQ ID NO: 1057977 - DNA, 33 bp, Homo sapien
caatcttagcccaataccacgcaatcctggact

SEQ ID NO: 1057978 - DNA, 33 bp, Homo sapien
caatcttagcccaatatcacgcaatcctggact

SEQ ID NO: 1057979 - DNA, 33 bp, Homo sapien
acggtgtggcaattccacagaaacctaaaaaca

SEQ ID NO: 1057980 - DNA, 33 bp, Homo sapien
acggtgtggcaattccgcagaaacctaaaaaca

SEQ ID NO: 1057981 - DNA, 33 bp, Homo sapien
aaagattatcatcaaagacattagcaaatgcac

SEQ ID NO: 1057982 - DNA, 33 bp, Homo sapien
aaagattatcatcaaatacattagcaaatgcac

SEQ ID NO: 1057983 - DNA, 33 bp, Homo sapien
gaatagggagaggtagaaaaggataggaccagc

SEQ ID NO: 1057984 - DNA, 33 bp, Homo sapien
gaatagggagaggtagtaaaggataggaccagc

SEQ ID NO: 1057985 - DNA, 33 bp, Homo sapien
agacaaaatatcccgacctaagtcactttgaaa

SEQ ID NO: 1057986 - DNA, 33 bp, Homo sapien
agacaaaatatcccgatctaagtcactttgaaa

SEQ ID NO: 1057987 - DNA, 33 bp, Homo sapien
aaaaaagttgtataaggcctgatattaataatg

SEQ ID NO: 1057988 - DNA, 33 bp, Homo sapien
aaaaaagttgtataagtcctgatattaataatg

SEQ ID NO: 1057989 - DNA, 33 bp, Homo sapien
agcaacttgatacataaaggaacatcaccaata

SEQ ID NO: 1057990 - DNA, 33 bp, Homo sapien
agcaacttgatacatagaggaacatcaccaata

SEQ ID NO: 1057991 - DNA, 33 bp, Homo sapien
gcaaaagctggccccaatggagactgagtcaaa

SEQ ID NO: 1057992 - DNA, 33 bp, Homo sapien
gcaaaagctggccccagtggagactgagtcaaa

SEQ ID NO: 1057993 - DNA, 33 bp, Homo sapien
ttggaccatcttagtcaaggaagggaagaactt

SEQ ID NO: 1057994 - DNA, 33 bp, Homo sapien
ttggaccatcttagtcgaggaagggaagaactt

SEQ ID NO: 1057995 - DNA, 33 bp, Homo sapien
gctgcctcaggcagtaaaaccccactggcattt

SEQ ID NO: 1057996 - DNA, 33 bp, Homo sapien
gctgcctcaggcagtagaaccccactggcattt

SEQ ID NO: 1057997 - DNA, 33 bp, Homo sapien
aactctgagtgctaaaacagtgtctcccaagag

SEQ ID NO: 1057998 - DNA, 33 bp, Homo sapien
aactctgagtgctaaaccagtgtctcccaagag

SEQ ID NO: 1057999 - DNA, 33 bp, Homo sapien
atggtagcatcacaaaagatcagatacttagga

SEQ ID NO: 1058000 - DNA, 33 bp, Homo sapien
atggtagcatcacaaatgatcagatacttagga

SEQ ID NO: 1058001 - DNA, 33 bp, Homo sapien
atgtgacttttatctccctcagtgtagctttaa

SEQ ID NO: 1058002 - DNA, 33 bp, Homo sapien
atgtgacttttatctctctcagtgtagctttaa

SEQ ID NO: 1058003 - DNA, 33 bp, Homo sapien
aaaacaacattttttaaacaatcaatagatgaa

SEQ ID NO: 1058004 - DNA, 33 bp, Homo sapien
aaaacaacattttttagacaatcaatagatgaa

SEQ ID NO: 1058005 - DNA, 33 bp, Homo sapien
tttttgtttacacagcgaagaaacacaatgaat

SEQ ID NO: 1058006 - DNA, 33 bp, Homo sapien
tttttgtttacacagctaagaaacacaatgaat

SEQ ID NO: 1058007 - DNA, 33 bp, Homo sapien
atgtgactaagatacgaaagatacagatattaa

SEQ ID NO: 1058008 - DNA, 33 bp, Homo sapien
atgtgactaagatacggaagatacagatattaa

SEQ ID NO: 1058009 - DNA, 33 bp, Homo sapien
ggaagtcatgccaccaacttttgtaactctccc

SEQ ID NO: 1058010 - DNA, 33 bp, Homo sapien
ggaagtcatgccaccagcttttgtaactctccc

SEQ ID NO: 1058011 - DNA, 33 bp, Homo sapien
aatgtatttttaatcaccggaatgtattgtacc

SEQ ID NO: 1058012 - DNA, 33 bp, Homo sapien
aatgtatttttaatcatcggaatgtattgtacc

SEQ ID NO: 1058013 - DNA, 33 bp, Homo sapien
tttcagagagttgctacattcactctaattccc

SEQ ID NO: 1058014 - DNA, 33 bp, Homo sapien
tttcagagagttgctatattcactctaattccc

SEQ ID NO: 1058015 - DNA, 33 bp, Homo sapien
attgctccttaacaataaaatggttcagattta

SEQ ID NO: 1058016 - DNA, 33 bp, Homo sapien
attgctccttaacaatgaaatggttcagattta

SEQ ID NO: 1058017 - DNA, 33 bp, Homo sapien
ttacaggcataagacaccatgctcggctgagta

SEQ ID NO: 1058018 - DNA, 33 bp, Homo sapien
ttacaggcataagacatcatgctcggctgagta

SEQ ID NO: 1058019 - DNA, 33 bp, Homo sapien
acacactttttccaaaaggcaaattaacgtgga

SEQ ID NO: 1058020 - DNA, 33 bp, Homo sapien
acacactttttccaaagggcaaattaacgtgga

SEQ ID NO: 1058021 - DNA, 33 bp, Homo sapien
atgtacagattttgtcccaagttccttttgtcc

SEQ ID NO: 1058022 - DNA, 33 bp, Homo sapien
atgtacagattttgtctcaagttccttttgtcc

SEQ ID NO: 1058023 - DNA, 33 bp, Homo sapien
acttaaaaaaagacaacagacagtcatccaata

SEQ ID NO: 1058024 - DNA, 33 bp, Homo sapien
acttaaaaaaagacaagagacagtcatccaata

SEQ ID NO: 1058025 - DNA, 33 bp, Homo sapien
tcatatttgcagtctaacccttaggaacaaatc

SEQ ID NO: 1058026 - DNA, 33 bp, Homo sapien
tcatatttgcagtctatcccttaggaacaaatc

SEQ ID NO: 1058027 - DNA, 33 bp, Homo sapien
aatgttaaagagtcatcagatcattgtccctat

SEQ ID NO: 1058028 - DNA, 33 bp, Homo sapien
aatgttaaagagtcatgagatcattgtccctat

SEQ ID NO: 1058029 - DNA, 33 bp, Homo sapien
ataaaaagttttgtgaacacataaaagacaaag

SEQ ID NO: 1058030 - DNA, 33 bp, Homo sapien
ataaaaagttttgtgagcacataaaagacaaag

SEQ ID NO: 1058031 - DNA, 33 bp, Homo sapien
aatgcacttggtcatgaaagagctctaatggag

SEQ ID NO: 1058032 - DNA, 33 bp, Homo sapien
aatgcacttggtcatgcaagagctctaatggag

SEQ ID NO: 1058033 - DNA, 33 bp, Homo sapien
agcaggtgctaaaggacatcaacatgcagaaca

SEQ ID NO: 1058034 - DNA, 33 bp, Homo sapien
agcaggtgctaaaggatatcaacatgcagaaca

SEQ ID NO: 1058035 - DNA, 33 bp, Homo sapien
tggacagataattgcaatctttttttaggaaaa

SEQ ID NO: 1058036 - DNA, 33 bp, Homo sapien
tggacagataattgcagtctttttttaggaaaa

SEQ ID NO: 1058037 - DNA, 33 bp, Homo sapien
tgatcagtgccattgacatagtcctgactcacc

SEQ ID NO: 1058038 - DNA, 33 bp, Homo sapien
tgatcagtgccattgatatagtcctgactcacc

SEQ ID NO: 1058039 - DNA, 33 bp, Homo sapien
cagacattggacttaccaggtagacttcaaaat

SEQ ID NO: 1058040 - DNA, 33 bp, Homo sapien
cagacattggacttactaggtagacttcaaaat

SEQ ID NO: 1058041 - DNA, 33 bp, Homo sapien
gattttcagagttctcacattgtattctttgaa

SEQ ID NO: 1058042 - DNA, 33 bp, Homo sapien
gattttcagagttctcgcattgtattctttgaa

SEQ ID NO: 1058043 - DNA, 33 bp, Homo sapien
tgcccaatattttaagccctaaacaataactga

SEQ ID NO: 1058044 - DNA, 33 bp, Homo sapien
tgcccaatattttaagtcctaaacaataactga

SEQ ID NO: 1058045 - DNA, 33 bp, Homo sapien
ttagtttagtcacccccgctctcttctggttag

SEQ ID NO: 1058046 - DNA, 33 bp, Homo sapien
ttagtttagtcacccctgctctcttctggttag

SEQ ID NO: 1058047 - DNA, 33 bp, Homo sapien
tatataccctaaggaaaaagcacaaagtgaggc

SEQ ID NO: 1058048 - DNA, 33 bp, Homo sapien
tatataccctaaggaagaagcacaaagtgaggc

SEQ ID NO: 1058049 - DNA, 33 bp, Homo sapien
gaatgcatgggtccagcaattaaggggcaggaa

SEQ ID NO: 1058050 - DNA, 33 bp, Homo sapien
gaatgcatgggtccaggaattaaggggcaggaa

SEQ ID NO: 1058051 - DNA, 33 bp, Homo sapien
cacttcctgtccacaaacttcagctctactagt

SEQ ID NO: 1058052 - DNA, 33 bp, Homo sapien
cacttcctgtccacaaccttcagctctactagt

SEQ ID NO: 1058053 - DNA, 33 bp, Homo sapien
tccttaagaattgtgcaaaatctactctgcctg

SEQ ID NO: 1058054 - DNA, 33 bp, Homo sapien
tccttaagaattgtgcgaaatctactctgcctg

SEQ ID NO: 1058055 - DNA, 33 bp, Homo sapien
taactcatgattaaggcatctggtgagttccaa

SEQ ID NO: 1058056 - DNA, 33 bp, Homo sapien
taactcatgattaaggtatctggtgagttccaa

SEQ ID NO: 1058057 - DNA, 33 bp, Homo sapien
ttcagtaatctcactccgaagtatctgctattt

SEQ ID NO: 1058058 - DNA, 33 bp, Homo sapien
ttcagtaatctcactctgaagtatctgctattt

SEQ ID NO: 1058059 - DNA, 33 bp, Homo sapien
caatattcccatatcacgttgtatgcaaaaata

SEQ ID NO: 1058060 - DNA, 33 bp, Homo sapien
caatattcccatatcatgttgtatgcaaaaata

SEQ ID NO: 1058061 - DNA, 33 bp, Homo sapien
cacatttagtaaacaccgtcagttagccatttt

SEQ ID NO: 1058062 - DNA, 33 bp, Homo sapien
cacatttagtaaacactgtcagttagccatttt

SEQ ID NO: 1058063 - DNA, 33 bp, Homo sapien
gtctcgagatattagaaaccaggcaatggtgaa

SEQ ID NO: 1058064 - DNA, 33 bp, Homo sapien
gtctcgagatattagagaccaggcaatggtgaa

SEQ ID NO: 1058065 - DNA, 33 bp, Homo sapien
ccacaaaaataaactccaatggatcgagactct

SEQ ID NO: 1058066 - DNA, 33 bp, Homo sapien
ccacaaaaataaactctaatggatcgagactct

SEQ ID NO: 1058067 - DNA, 33 bp, Homo sapien
ctactgccaaagacataatggagactcagtggt

SEQ ID NO: 1058068 - DNA, 33 bp, Homo sapien
ctactgccaaagacatgatggagactcagtggt

SEQ ID NO: 1058069 - DNA, 33 bp, Homo sapien
tgttttacttcgtctcacaaattaggtccaacc

SEQ ID NO: 1058070 - DNA, 33 bp, Homo sapien
tgttttacttcgtctcgcaaattaggtccaacc

SEQ ID NO: 1058071 - DNA, 33 bp, Homo sapien
ccaacaaattctatgacataaattacctcatct

SEQ ID NO: 1058072 - DNA, 33 bp, Homo sapien
ccaacaaattctatgatataaattacctcatct

SEQ ID NO: 1058073 - DNA, 33 bp, Homo sapien
atacaaagagatgaaaagcacttgaaatgcagc

SEQ ID NO: 1058074 - DNA, 33 bp, Homo sapien
atacaaagagatgaaaggcacttgaaatgcagc

SEQ ID NO: 1058075 - DNA, 33 bp, Homo sapien
aactatcagagggaaaattgacagagaatgagg

SEQ ID NO: 1058076 - DNA, 33 bp, Homo sapien
aactatcagagggaaacttgacagagaatgagg

SEQ ID NO: 1058077 - DNA, 33 bp, Homo sapien
gcagttaagtctatgcaacttagtaagtattta

SEQ ID NO: 1058078 - DNA, 33 bp, Homo sapien
gcagttaagtctatgccacttagtaagtattta

SEQ ID NO: 1058079 - DNA, 33 bp, Homo sapien
gggaatatactacgtaaggtatgctaatcttgg

SEQ ID NO: 1058080 - DNA, 33 bp, Homo sapien
gggaatatactacgtagggtatgctaatcttgg

SEQ ID NO: 1058081 - DNA, 33 bp, Homo sapien
attgggagtacaaagacgatgaagaccttacca

SEQ ID NO: 1058082 - DNA, 33 bp, Homo sapien
attgggagtacaaagatgatgaagaccttacca

SEQ ID NO: 1058083 - DNA, 33 bp, Homo sapien
agagcatggccagtcacaccgtttcctgaaaat

SEQ ID NO: 1058084 - DNA, 33 bp, Homo sapien
agagcatggccagtcataccgtttcctgaaaat

SEQ ID NO: 1058085 - DNA, 33 bp, Homo sapien
gtagaacacaagcagcagagttatctacatcta

SEQ ID NO: 1058086 - DNA, 33 bp, Homo sapien
gtagaacacaagcagcggagttatctacatcta

SEQ ID NO: 1058087 - DNA, 33 bp, Homo sapien
gttcctcagtcataatcaggctttgaatgcaac

SEQ ID NO: 1058088 - DNA, 33 bp, Homo sapien
gttcctcagtcataattaggctttgaatgcaac

SEQ ID NO: 1058089 - DNA, 33 bp, Homo sapien
ttctcaatgctctctacatatatgtttttgaga

SEQ ID NO: 1058090 - DNA, 33 bp, Homo sapien
ttctcaatgctctctatatatatgtttttgaga

SEQ ID NO: 1058091 - DNA, 33 bp, Homo sapien
aacaacctgaatgaaaatccatagcaagaagtt

SEQ ID NO: 1058092 - DNA, 33 bp, Homo sapien
aacaacctgaatgaaagtccatagcaagaagtt

SEQ ID NO: 1058093 - DNA, 33 bp, Homo sapien
ttctacaacagaaccaagttttctacaacagaa

SEQ ID NO: 1058094 - DNA, 33 bp, Homo sapien
ttctacaacagaaccaggttttctacaacagaa

SEQ ID NO: 1058095 - DNA, 33 bp, Homo sapien
ggctgtgaccattttaaagactgatttccaggc

SEQ ID NO: 1058096 - DNA, 33 bp, Homo sapien
ggctgtgaccattttatagactgatttccaggc

SEQ ID NO: 1058097 - DNA, 33 bp, Homo sapien
acttgtcctactatcaagggatgatgtggaaga

SEQ ID NO: 1058098 - DNA, 33 bp, Homo sapien
acttgtcctactatcacgggatgatgtggaaga

SEQ ID NO: 1058099 - DNA, 33 bp, Homo sapien
atggactgacatgtgacaaatggtgctgcttca

SEQ ID NO: 1058100 - DNA, 33 bp, Homo sapien
atggactgacatgtgagaaatggtgctgcttca

SEQ ID NO: 1058101 - DNA, 33 bp, Homo sapien
cttgttataaatgcaccaaaatgtcagtggata

SEQ ID NO: 1058102 - DNA, 33 bp, Homo sapien
cttgttataaatgcactaaaatgtcagtggata

SEQ ID NO: 1058103 - DNA, 33 bp, Homo sapien
taccaaacaatcacatcaaaatcctgaaataat

SEQ ID NO: 1058104 - DNA, 33 bp, Homo sapien
taccaaacaatcacattaaaatcctgaaataat

SEQ ID NO: 1058105 - DNA, 33 bp, Homo sapien
tctattttgtcttatagaaccacatctattcct

SEQ ID NO: 1058106 - DNA, 33 bp, Homo sapien
tctattttgtcttatataaccacatctattcct

SEQ ID NO: 1058107 - DNA, 33 bp, Homo sapien
aagatcagtttcttcaatcccatgaacaacttt

SEQ ID NO: 1058108 - DNA, 33 bp, Homo sapien
aagatcagtttcttcactcccatgaacaacttt

SEQ ID NO: 1058109 - DNA, 33 bp, Homo sapien
aaggacatttctcacaaggtgaacatcattcat

SEQ ID NO: 1058110 - DNA, 33 bp, Homo sapien
aaggacatttctcacagggtgaacatcattcat

SEQ ID NO: 1058111 - DNA, 33 bp, Homo sapien
atgtccacattttgtccctgaaaagaagaaaat

SEQ ID NO: 1058112 - DNA, 33 bp, Homo sapien
atgtccacattttgtctctgaaaagaagaaaat

SEQ ID NO: 1058113 - DNA, 33 bp, Homo sapien
ttatctgtaaaacaagacaacctttattcacca

SEQ ID NO: 1058114 - DNA, 33 bp, Homo sapien
ttatctgtaaaacaaggcaacctttattcacca

SEQ ID NO: 1058115 - DNA, 33 bp, Homo sapien
agggtaggcttgaaaaagaagctatctcctact

SEQ ID NO: 1058116 - DNA, 33 bp, Homo sapien
agggtaggcttgaaaaggaagctatctcctact

SEQ ID NO: 1058117 - DNA, 33 bp, Homo sapien
ctgtgggaccttctaacgtttaatggctgggga

SEQ ID NO: 1058118 - DNA, 33 bp, Homo sapien
ctgtgggaccttctaatgtttaatggctgggga

SEQ ID NO: 1058119 - DNA, 33 bp, Homo sapien
ttaaaggacaaagtacagatacatgtggtaaca

SEQ ID NO: 1058120 - DNA, 33 bp, Homo sapien
ttaaaggacaaagtactgatacatgtggtaaca

SEQ ID NO: 1058121 - DNA, 33 bp, Homo sapien
ccggagagtgagtggaatagaagttattaagtg

SEQ ID NO: 1058122 - DNA, 33 bp, Homo sapien
ccggagagtgagtggagtagaagttattaagtg

SEQ ID NO: 1058123 - DNA, 33 bp, Homo sapien
gcttccgctagtgttacggtctttctgcccctt

SEQ ID NO: 1058124 - DNA, 33 bp, Homo sapien
gcttccgctagtgttatggtctttctgcccctt

SEQ ID NO: 1058125 - DNA, 33 bp, Homo sapien
gctagcatcccaataacggtgtgcccttcatga

SEQ ID NO: 1058126 - DNA, 33 bp, Homo sapien
gctagcatcccaataatggtgtgcccttcatga

SEQ ID NO: 1058127 - DNA, 33 bp, Homo sapien
tattaactctacaccacggtttcttagtgtggc

SEQ ID NO: 1058128 - DNA, 33 bp, Homo sapien
tattaactctacaccagggtttcttagtgtggc

SEQ ID NO: 1058129 - DNA, 33 bp, Homo sapien
gctttatcagtacttacaggatccgggacacac

SEQ ID NO: 1058130 - DNA, 33 bp, Homo sapien
gctttatcagtacttagaggatccgggacacac

SEQ ID NO: 1058131 - DNA, 33 bp, Homo sapien
tataaatctaggtggacgtattatatgggtgtt

SEQ ID NO: 1058132 - DNA, 33 bp, Homo sapien
tataaatctaggtggaggtattatatgggtgtt

SEQ ID NO: 1058133 - DNA, 33 bp, Homo sapien
ctttgcagttgggggactaaggctctaatcatg

SEQ ID NO: 1058134 - DNA, 33 bp, Homo sapien
ctttgcagttgggggattaaggctctaatcatg

SEQ ID NO: 1058135 - DNA, 33 bp, Homo sapien
aacagaaagtagcagaatagtgtaatatattga

SEQ ID NO: 1058136 - DNA, 33 bp, Homo sapien
aacagaaagtagcagagtagtgtaatatattga

SEQ ID NO: 1058137 - DNA, 33 bp, Homo sapien
tctgggttttgaattcaatatcaacaattttgt

SEQ ID NO: 1058138 - DNA, 33 bp, Homo sapien
tctgggttttgaattctatatcaacaattttgt

SEQ ID NO: 1058139 - DNA, 33 bp, Homo sapien
agtcagtttggcatagcatattacatagagtat

SEQ ID NO: 1058140 - DNA, 33 bp, Homo sapien
agtcagtttggcatagtatattacatagagtat

SEQ ID NO: 1058141 - DNA, 33 bp, Homo sapien
gggggagagttaatgacggaggcatatttaaga

SEQ ID NO: 1058142 - DNA, 33 bp, Homo sapien
gggggagagttaatgatggaggcatatttaaga

SEQ ID NO: 1058143 - DNA, 33 bp, Homo sapien
tgagcgtcctttgcaacggctgtgtccttatgg

SEQ ID NO: 1058144 - DNA, 33 bp, Homo sapien
tgagcgtcctttgcaatggctgtgtccttatgg

SEQ ID NO: 1058145 - DNA, 33 bp, Homo sapien
tcttaactgagctgctaactaatcaagcatgaa

SEQ ID NO: 1058146 - DNA, 33 bp, Homo sapien
tcttaactgagctgctgactaatcaagcatgaa

SEQ ID NO: 1058147 - DNA, 33 bp, Homo sapien
gggcttgggagtttcacaaatgcaatgggttga

SEQ ID NO: 1058148 - DNA, 33 bp, Homo sapien
gggcttgggagtttcagaaatgcaatgggttga

SEQ ID NO: 1058149 - DNA, 33 bp, Homo sapien
tggtttcttcttcctacgtaagacactaccctg

SEQ ID NO: 1058150 - DNA, 33 bp, Homo sapien
tggtttcttcttcctatgtaagacactaccctg

SEQ ID NO: 1058151 - DNA, 33 bp, Homo sapien
ataaaaggaaatgtaacacactgtcatttaaat

SEQ ID NO: 1058152 - DNA, 33 bp, Homo sapien
ataaaaggaaatgtaatacactgtcatttaaat

SEQ ID NO: 1058153 - DNA, 33 bp, Homo sapien
taacttgctttgccacacatcagaggaaagggg

SEQ ID NO: 1058154 - DNA, 33 bp, Homo sapien
taacttgctttgccacgcatcagaggaaagggg

SEQ ID NO: 1058155 - DNA, 33 bp, Homo sapien
attggagagttcccttaaacgtcaggccttaca

SEQ ID NO: 1058156 - DNA, 33 bp, Homo sapien
attggagagttcccttcaacgtcaggccttaca

SEQ ID NO: 1058157 - DNA, 33 bp, Homo sapien
tttaaaataaagaaaacgtcagctggaccacaa

SEQ ID NO: 1058158 - DNA, 33 bp, Homo sapien
tttaaaataaagaaaatgtcagctggaccacaa

SEQ ID NO: 1058159 - DNA, 33 bp, Homo sapien
tgggagagagaacaaccagtccataaatgacaa

SEQ ID NO: 1058160 - DNA, 33 bp, Homo sapien
tgggagagagaacaacgagtccataaatgacaa

SEQ ID NO: 1058161 - DNA, 33 bp, Homo sapien
cataccatatatagttaaaaacatgcaaagtta

SEQ ID NO: 1058162 - DNA, 33 bp, Homo sapien
cataccatatatagtttaaaacatgcaaagtta

SEQ ID NO: 1058163 - DNA, 33 bp, Homo sapien
gagaaagaaccaaatcgaattccaagaaatgca

SEQ ID NO: 1058164 - DNA, 33 bp, Homo sapien
gagaaagaaccaaatctaattccaagaaatgca

SEQ ID NO: 1058165 - DNA, 33 bp, Homo sapien
ccttcccttctacctcggaggcaactgtcattc

SEQ ID NO: 1058166 - DNA, 33 bp, Homo sapien
ccttcccttctacctctgaggcaactgtcattc

SEQ ID NO: 1058167 - DNA, 33 bp, Homo sapien
attgcattcattaatacagtgggctatgaatga

SEQ ID NO: 1058168 - DNA, 33 bp, Homo sapien
attgcattcattaatagagtgggctatgaatga

SEQ ID NO: 1058169 - DNA, 33 bp, Homo sapien
gagtaaagtgaagccaactctattaagatgctg

SEQ ID NO: 1058170 - DNA, 33 bp, Homo sapien
gagtaaagtgaagccagctctattaagatgctg

SEQ ID NO: 1058171 - DNA, 33 bp, Homo sapien
ggggactcgaggaaagcctagagcaccgtggag

SEQ ID NO: 1058172 - DNA, 33 bp, Homo sapien
ggggactcgaggaaaggctagagcaccgtggag

SEQ ID NO: 1058173 - DNA, 33 bp, Homo sapien
gggtaggcctgaatccaaacctgattgacaacc

SEQ ID NO: 1058174 - DNA, 33 bp, Homo sapien
gggtaggcctgaatcccaacctgattgacaacc

SEQ ID NO: 1058175 - DNA, 33 bp, Homo sapien
tttctgtcctgctgagccacgcttttcctgatt

SEQ ID NO: 1058176 - DNA, 33 bp, Homo sapien
tttctgtcctgctgagtcacgcttttcctgatt

SEQ ID NO: 1058177 - DNA, 33 bp, Homo sapien
tgtgtgtgtgtaagacgctggagcaatgcaaag

SEQ ID NO: 1058178 - DNA, 33 bp, Homo sapien
tgtgtgtgtgtaagactctggagcaatgcaaag

SEQ ID NO: 1058179 - DNA, 33 bp, Homo sapien
tcatgaagcattggtacacaaggaagaaggaaa

SEQ ID NO: 1058180 - DNA, 33 bp, Homo sapien
tcatgaagcattggtatacaaggaagaaggaaa

SEQ ID NO: 1058181 - DNA, 33 bp, Homo sapien
tatacattttaaaacaacttagcataaatgttt

SEQ ID NO: 1058182 - DNA, 33 bp, Homo sapien
tatacattttaaaacatcttagcataaatgttt

SEQ ID NO: 1058183 - DNA, 33 bp, Homo sapien
tatatcacagttactccaggattacactatact

SEQ ID NO: 1058184 - DNA, 33 bp, Homo sapien
tatatcacagttactctaggattacactatact

SEQ ID NO: 1058185 - DNA, 33 bp, Homo sapien
aagaagataactcttgacaaaaaattgggtatt

SEQ ID NO: 1058186 - DNA, 33 bp, Homo sapien
aagaagataactcttgtcaaaaaattgggtatt

SEQ ID NO: 1058187 - DNA, 33 bp, Homo sapien
gttgggtcatccctcaaaaaggcctcttggctg

SEQ ID NO: 1058188 - DNA, 33 bp, Homo sapien
gttgggtcatccctcagaaaggcctcttggctg

SEQ ID NO: 1058189 - DNA, 33 bp, Homo sapien
ctatgggctctcagaacgctctgtgcttttctt

SEQ ID NO: 1058190 - DNA, 33 bp, Homo sapien
ctatgggctctcagaatgctctgtgcttttctt

SEQ ID NO: 1058191 - DNA, 33 bp, Homo sapien
ctcagggctgccagaaaggtttgatcaggttag

SEQ ID NO: 1058192 - DNA, 33 bp, Homo sapien
ctcagggctgccagaacggtttgatcaggttag

SEQ ID NO: 1058193 - DNA, 33 bp, Homo sapien
tcaacaagcgcctatcactaccagctgacatcc

SEQ ID NO: 1058194 - DNA, 33 bp, Homo sapien
tcaacaagcgcctatcgctaccagctgacatcc

SEQ ID NO: 1058195 - DNA, 33 bp, Homo sapien
tcaagatctttgtgagacccaaaatgatcaatc

SEQ ID NO: 1058196 - DNA, 33 bp, Homo sapien
tcaagatctttgtgaggcccaaaatgatcaatc

SEQ ID NO: 1058197 - DNA, 33 bp, Homo sapien
ggtagagaaacttaacagaaaatggtggcgtgt

SEQ ID NO: 1058198 - DNA, 33 bp, Homo sapien
ggtagagaaacttaacggaaaatggtggcgtgt

SEQ ID NO: 1058199 - DNA, 33 bp, Homo sapien
gggcagtacctacagacagagcccgagtcagca

SEQ ID NO: 1058200 - DNA, 33 bp, Homo sapien
gggcagtacctacagagagagcccgagtcagca

SEQ ID NO: 1058201 - DNA, 33 bp, Homo sapien
gctcagggcttgtcaggaggtcagtatacctca

SEQ ID NO: 1058202 - DNA, 33 bp, Homo sapien
gctcagggcttgtcagtaggtcagtatacctca

SEQ ID NO: 1058203 - DNA, 33 bp, Homo sapien
cttggactaaccctgacacaggccgctcccaac

SEQ ID NO: 1058204 - DNA, 33 bp, Homo sapien
cttggactaaccctgatacaggccgctcccaac

SEQ ID NO: 1058205 - DNA, 33 bp, Homo sapien; identical to SEQ ID NO: 1058203

SEQ ID NO: 1058206 - DNA, 33 bp, Homo sapien; identical to SEQ ID NO: 1058204

SEQ ID NO: 1058207 - DNA, 33 bp, Homo sapien
ttgtcctagacttcaaatcaaaaaaaatgctgc

SEQ ID NO: 1058208 - DNA, 33 bp, Homo sapien
ttgtcctagacttcaagtcaaaaaaaatgctgc

SEQ ID NO: 1058209 - DNA, 33 bp, Homo sapien
aaaatctcaccatatacatgatatagaaaaaga

SEQ ID NO: 1058210 - DNA, 33 bp, Homo sapien
aaaatctcaccatatagatgatatagaaaaaga

SEQ ID NO: 1058211 - DNA, 33 bp, Homo sapien
ggccaatggtttaaccaatcatgtctaggtaat

SEQ ID NO: 1058212 - DNA, 33 bp, Homo sapien
ggccaatggtttaaccgatcatgtctaggtaat

SEQ ID NO: 1058213 - DNA, 33 bp, Homo sapien
gtaccaaacagtataaacattcactggttgaaa

SEQ ID NO: 1058214 - DNA, 33 bp, Homo sapien
gtaccaaacagtataaccattcactggttgaaa

SEQ ID NO: 1058215 - DNA, 33 bp, Homo sapien
tcctgaaatgggaacaagggatgttttattgct

SEQ ID NO: 1058216 - DNA, 33 bp, Homo sapien
tcctgaaatgggaacaggggatgttttattgct

SEQ ID NO: 1058217 - DNA, 33 bp, Homo sapien
ccacacaccactgtgacctccatgtgcttcctc

SEQ ID NO: 1058218 - DNA, 33 bp, Homo sapien
ccacacaccactgtgatctccatgtgcttcctc

SEQ ID NO: 1058219 - DNA, 33 bp, Homo sapien
gtttttccctacctgacgcagtagtctcaggac

SEQ ID NO: 1058220 - DNA, 33 bp, Homo sapien
gtttttccctacctgatgcagtagtctcaggac

SEQ ID NO: 1058221 - DNA, 33 bp, Homo sapien
actgcgggggcctgcaagaactaggtgcttggg

SEQ ID NO: 1058222 - DNA, 33 bp, Homo sapien
actgcgggggcctgcaggaactaggtgcttggg

SEQ ID NO: 1058223 - DNA, 33 bp, Homo sapien
catgaatagttagagcaatccaggtagagtcaa

SEQ ID NO: 1058224 - DNA, 33 bp, Homo sapien
catgaatagttagagcgatccaggtagagtcaa

SEQ ID NO: 1058225 - DNA, 33 bp, Homo sapien
gaaataggaggaggtaccaggaaatagaggaac

SEQ ID NO: 1058226 - DNA, 33 bp, Homo sapien
gaaataggaggaggtatcaggaaatagaggaac

SEQ ID NO: 1058227 - DNA, 33 bp, Homo sapien
cttgcccagccaatagcagggatttctagacga

SEQ ID NO: 1058228 - DNA, 33 bp, Homo sapien
cttgcccagccaatagtagggatttctagacga

SEQ ID NO: 1058229 - DNA, 33 bp, Homo sapien
atccccataattatctcaatgcttgatccatgt

SEQ ID NO: 1058230 - DNA, 33 bp, Homo sapien
atccccataattatcttaatgcttgatccatgt

SEQ ID NO: 1058231 - DNA, 33 bp, Homo sapien
tagggccacttaagcactgagataaatatggag

SEQ ID NO: 1058232 - DNA, 33 bp, Homo sapien
tagggccacttaagcattgagataaatatggag

SEQ ID NO: 1058233 - DNA, 33 bp, Homo sapien
tagaataccattcttgaacacaatgaaagaatg

SEQ ID NO: 1058234 - DNA, 33 bp, Homo sapien
tagaataccattcttggacacaatgaaagaatg

SEQ ID NO: 1058235 - DNA, 33 bp, Homo sapien
cctagtcagttagaagcatgaagacagagttgt

SEQ ID NO: 1058236 - DNA, 33 bp, Homo sapien
cctagtcagttagaaggatgaagacagagttgt

SEQ ID NO: 1058237 - DNA, 33 bp, Homo sapien
aatgtggatttctaaaccttgctagtcagtttg

SEQ ID NO: 1058238 - DNA, 33 bp, Homo sapien
aatgtggatttctaaatcttgctagtcagtttg

SEQ ID NO: 1058239 - DNA, 33 bp, Homo sapien
tctgcctgtcagtttcaaggtctcatctcagtg

SEQ ID NO: 1058240 - DNA, 33 bp, Homo sapien
tctgcctgtcagtttcgaggtctcatctcagtg

SEQ ID NO: 1058241 - DNA, 33 bp, Homo sapien
agttttagaaataagacacttcagcaaagttgc

SEQ ID NO: 1058242 - DNA, 33 bp, Homo sapien
agttttagaaataagagacttcagcaaagttgc

SEQ ID NO: 1058243 - DNA, 33 bp, Homo sapien
ctcttctgtatgatacaataatggtggaaacat

SEQ ID NO: 1058244 - DNA, 33 bp, Homo sapien
ctcttctgtatgatactataatggtggaaacat

SEQ ID NO: 1058245 - DNA, 33 bp, Homo sapien
agttgagatgggtgtgaagtgagtctatgagtc

SEQ ID NO: 1058246 - DNA, 33 bp, Homo sapien
agttgagatgggtgtggagtgagtctatgagtc

SEQ ID NO: 1058247 - DNA, 33 bp, Homo sapien
atcataaattaaggaaacccacgagagaggaat

SEQ ID NO: 1058248 - DNA, 33 bp, Homo sapien
atcataaattaaggaaccccacgagagaggaat

SEQ ID NO: 1058249 - DNA, 33 bp, Homo sapien
tgggccttgatactgacagtaccccagctcgct

SEQ ID NO: 1058250 - DNA, 33 bp, Homo sapien
tgggccttgatactgatagtaccccagctcgct

SEQ ID NO: 1058251 - DNA, 33 bp, Homo sapien
tgacaaatcactgcctgactggaaattccccat

SEQ ID NO: 1058252 - DNA, 33 bp, Homo sapien
tgacaaatcactgccttactggaaattccccat

SEQ ID NO: 1058253 - DNA, 33 bp, Homo sapien
aggacagtaacacccacgtgtttggatggggca

SEQ ID NO: 1058254 - DNA, 33 bp, Homo sapien
aggacagtaacacccatgtgtttggatggggca

SEQ ID NO: 1058255 - DNA, 33 bp, Homo sapien
ggagaacgacctccacactgggttccatccttc

SEQ ID NO: 1058256 - DNA, 33 bp, Homo sapien
ggagaacgacctccacgctgggttccatccttc

SEQ ID NO: 1058257 - DNA, 33 bp, Homo sapien
cttgacctattttaacagatgttctacaagagc

SEQ ID NO: 1058258 - DNA, 33 bp, Homo sapien
cttgacctattttaacggatgttctacaagagc

SEQ ID NO: 1058259 - DNA, 33 bp, Homo sapien
gggatggaggatgctcacttgacctattttaac

SEQ ID NO: 1058260 - DNA, 33 bp, Homo sapien
gggatggaggatgctcgcttgacctattttaac

SEQ ID NO: 1058261 - DNA, 33 bp, Homo sapien
taaaaaatttacaatgacaatgtgatgagcaga

SEQ ID NO: 1058262 - DNA, 33 bp, Homo sapien
taaaaaatttacaatggcaatgtgatgagcaga

SEQ ID NO: 1058263 - DNA, 33 bp, Homo sapien
acaccgccaaaactcacgataactacctgatgt

SEQ ID NO: 1058264 - DNA, 33 bp, Homo sapien
acaccgccaaaactcatgataactacctgatgt

SEQ ID NO: 1058265 - DNA, 33 bp, Homo sapien
gatgagtgactgaacaagtgactgaggggcaca

SEQ ID NO: 1058266 - DNA, 33 bp, Homo sapien
gatgagtgactgaacaggtgactgaggggcaca

SEQ ID NO: 1058267 - DNA, 33 bp, Homo sapien
aaaatgacggtgtgcacgactgagagggcatgg

SEQ ID NO: 1058268 - DNA, 33 bp, Homo sapien
aaaatgacggtgtgcatgactgagagggcatgg

SEQ ID NO: 1058269 - DNA, 33 bp, Homo sapien
ataaaagctgtttctaagagtgctagttgtata

SEQ ID NO: 1058270 - DNA, 33 bp, Homo sapien
ataaaagctgtttctaggagtgctagttgtata

SEQ ID NO: 1058271 - DNA, 33 bp, Homo sapien
atgtctacaatctgaaaagtaagaggtactgta

SEQ ID NO: 1058272 - DNA, 33 bp, Homo sapien
atgtctacaatctgaagagtaagaggtactgta

SEQ ID NO: 1058273 - DNA, 33 bp, Homo sapien
aactaaggatctttgcaatcagtgatggggttg

SEQ ID NO: 1058274 - DNA, 33 bp, Homo sapien
aactaaggatctttgcgatcagtgatggggttg

SEQ ID NO: 1058275 - DNA, 33 bp, Homo sapien
ggaaatatagagactaagaaaacaccagttgtc

SEQ ID NO: 1058276 - DNA, 33 bp, Homo sapien
ggaaatatagagactaggaaaacaccagttgtc

SEQ ID NO: 1058277 - DNA, 33 bp, Homo sapien
acaacatcatttatgtaaaagttcatctttgcc

SEQ ID NO: 1058278 - DNA, 33 bp, Homo sapien
acaacatcatttatgtgaaagttcatctttgcc

SEQ ID NO: 1058279 - DNA, 33 bp, Homo sapien
agaagggaacctgaccggagatggtatcataga

SEQ ID NO: 1058280 - DNA, 33 bp, Homo sapien
agaagggaacctgacctgagatggtatcataga

SEQ ID NO: 1058281 - DNA, 33 bp, Homo sapien
aagtcaaaacattgtaagccagagaccatctgc

SEQ ID NO: 1058282 - DNA, 33 bp, Homo sapien
aagtcaaaacattgtaggccagagaccatctgc

SEQ ID NO: 1058283 - DNA, 33 bp, Homo sapien
cgtgtttcagtggactatataatgtagttgatg

SEQ ID NO: 1058284 - DNA, 33 bp, Homo sapien
cgtgtttcagtggactgtataatgtagttgatg

SEQ ID NO: 1058285 - DNA, 33 bp, Homo sapien
acaaggcactttgggaacattatggcttactct

SEQ ID NO: 1058286 - DNA, 33 bp, Homo sapien
acaaggcactttgggagcattatggcttactct

SEQ ID NO: 1058287 - DNA, 33 bp, Homo sapien; identical to SEQ ID NO: 1058285

SEQ ID NO: 1058288 - DNA, 33 bp, Homo sapien; identical to SEQ ID NO: 1058286

SEQ ID NO: 1058289 - DNA, 33 bp, Homo sapien
accgcttgatcaataaactcaaatgaaaatgta

SEQ ID NO: 1058290 - DNA, 33 bp, Homo sapien
accgcttgatcaataagctcaaatgaaaatgta

SEQ ID NO: 1058291 - DNA, 33 bp, Homo sapien
gtcattctttgggaacactgtgaataatctgtt

SEQ ID NO: 1058292 - DNA, 33 bp, Homo sapien
gtcattctttgggaaccctgtgaataatctgtt

SEQ ID NO: 1058293 - DNA, 33 bp, Homo sapien
cttcagagaagaaggaaatatagagccagcaaa

SEQ ID NO: 1058294 - DNA, 33 bp, Homo sapien
cttcagagaagaaggagatatagagccagcaaa

SEQ ID NO: 1058295 - DNA, 33 bp, Homo sapien
aatgaaaatcggactacaaaaatctgccttgct

SEQ ID NO: 1058296 - DNA, 33 bp, Homo sapien
aatgaaaatcggactataaaaatctgccttgct

SEQ ID NO: 1058297 - DNA, 33 bp, Homo sapien
tatgatataactttgacggcgtgaactttggag

SEQ ID NO: 1058298 - DNA, 33 bp, Homo sapien
tatgatataactttgagggcgtgaactttggag

SEQ ID NO: 1058299 - DNA, 33 bp, Homo sapien
ttacatatctgttcaagaaggcctctgactagt

SEQ ID NO: 1058300 - DNA, 33 bp, Homo sapien
ttacatatctgttcaataaggcctctgactagt

SEQ ID NO: 1058301 - DNA, 33 bp, Homo sapien
ttactgaatattttaacaccactgttgacacct

SEQ ID NO: 1058302 - DNA, 33 bp, Homo sapien
ttactgaatattttaagaccactgttgacacct

SEQ ID NO: 1058303 - DNA, 33 bp, Homo sapien
ttgtatgtagccgggcagattcatgttctcaag

SEQ ID NO: 1058304 - DNA, 33 bp, Homo sapien
ttgtatgtagccgggcggattcatgttctcaag

SEQ ID NO: 1058305 - DNA, 33 bp, Homo sapien
aagagatggctcctgaactcttaagaaaaacat

SEQ ID NO: 1058306 - DNA, 33 bp, Homo sapien
aagagatggctcctgagctcttaagaaaaacat

SEQ ID NO: 1058307 - DNA, 33 bp, Homo sapien
ggacccagagtgtggaaccaaaagccatgaaga

SEQ ID NO: 1058308 - DNA, 33 bp, Homo sapien
ggacccagagtgtggagccaaaagccatgaaga

SEQ ID NO: 1058309 - DNA, 33 bp, Homo sapien
gaagaatctcagacaaatcaaggaggacatcat

SEQ ID NO: 1058310 - DNA, 33 bp, Homo sapien
gaagaatctcagacaagtcaaggaggacatcat

SEQ ID NO: 1058311 - DNA, 33 bp, Homo sapien
ttattactcagttcccaatgaaatgtggttact

SEQ ID NO: 1058312 - DNA, 33 bp, Homo sapien
ttattactcagttccccatgaaatgtggttact

SEQ ID NO: 1058313 - DNA, 33 bp, Homo sapien
ttcctatactctggatcacatgccagtcttcct

SEQ ID NO: 1058314 - DNA, 33 bp, Homo sapien
ttcctatactctggattacatgccagtcttcct

SEQ ID NO: 1058315 - DNA, 33 bp, Homo sapien
atttaatcctttcagaggtcctatgaggtatct

SEQ ID NO: 1058316 - DNA, 33 bp, Homo sapien
atttaatcctttcagatgtcctatgaggtatct

SEQ ID NO: 1058317 - DNA, 33 bp, Homo sapien
cagttaggataatttccattgatctgtcttcaa

SEQ ID NO: 1058318 - DNA, 33 bp, Homo sapien
cagttaggataatttctattgatctgtcttcaa

SEQ ID NO: 1058319 - DNA, 33 bp, Homo sapien
gccttcaatgggttcagcagtagacttgacaaa

SEQ ID NO: 1058320 - DNA, 33 bp, Homo sapien
gccttcaatgggttcatcagtagacttgacaaa

SEQ ID NO: 1058321 - DNA, 33 bp, Homo sapien
tctgatagtaggagacaatggagactgtccaga

SEQ ID NO: 1058322 - DNA, 33 bp, Homo sapien
tctgatagtaggagaccatggagactgtccaga

SEQ ID NO: 1058323 - DNA, 33 bp, Homo sapien
tgtggaaaagcctgaactgtgctgttggaaaat

SEQ ID NO: 1058324 - DNA, 33 bp, Homo sapien
tgtggaaaagcctgaagtgtgctgttggaaaat

SEQ ID NO: 1058325 - DNA, 33 bp, Homo sapien
actcaagtcaaagcctaaaaagctaaggaagca

SEQ ID NO: 1058326 - DNA, 33 bp, Homo sapien
actcaagtcaaagcctgaaaagctaaggaagca

SEQ ID NO: 1058327 - DNA, 33 bp, Homo sapien
gccatgagcatgcgtaacacccagactgtgatc

SEQ ID NO: 1058328 - DNA, 33 bp, Homo sapien
gccatgagcatgcgtagcacccagactgtgatc

SEQ ID NO: 1058329 - DNA, 33 bp, Homo sapien
gaattcaacagaccgggaggggccatggacctt

SEQ ID NO: 1058330 - DNA, 33 bp, Homo sapien
gaattcaacagaccggtaggggccatggacctt

SEQ ID NO: 1058331 - DNA, 33 bp, Homo sapien
ccagaggcgaccagtacaaggtgtcctgttggc

SEQ ID NO: 1058332 - DNA, 33 bp, Homo sapien
ccagaggcgaccagtataaggtgtcctgttggc

SEQ ID NO: 1058333 - DNA, 33 bp, Homo sapien
ataaagcattgcttaaagtgaccaaaggcagga

SEQ ID NO: 1058334 - DNA, 33 bp, Homo sapien
ataaagcattgcttaaggtgaccaaaggcagga

SEQ ID NO: 1058335 - DNA, 33 bp, Homo sapien
aagatgacattcacaaaagaataactgaatgtc

SEQ ID NO: 1058336 - DNA, 33 bp, Homo sapien
aagatgacattcacaagagaataactgaatgtc

SEQ ID NO: 1058337 - DNA, 33 bp, Homo sapien
gggccaaggataaaaaaaaactacacagtaggt

SEQ ID NO: 1058338 - DNA, 33 bp, Homo sapien
gggccaaggataaaaagaaactacacagtaggt

SEQ ID NO: 1058339 - DNA, 33 bp, Homo sapien
aattggtcatttttccgctctgttgttcctggt

SEQ ID NO: 1058340 - DNA, 33 bp, Homo sapien
aattggtcatttttcctctctgttgttcctggt

SEQ ID NO: 1058341 - DNA, 33 bp, Homo sapien
aatcaacctcagtttcaatcagtggatgaacag

SEQ ID NO: 1058342 - DNA, 33 bp, Homo sapien
aatcaacctcagtttccatcagtggatgaacag

SEQ ID NO: 1058343 - DNA, 33 bp, Homo sapien
aaagaaattccaagtacatttctttcctacacc

SEQ ID NO: 1058344 - DNA, 33 bp, Homo sapien
aaagaaattccaagtagatttctttcctacacc

SEQ ID NO: 1058345 - DNA, 33 bp, Homo sapien
tggatttttggtgtgccacttctaaatcacttc

SEQ ID NO: 1058346 - DNA, 33 bp, Homo sapien
tggatttttggtgtgctacttctaaatcacttc

SEQ ID NO: 1058347 - DNA, 33 bp, Homo sapien
gtacacctggtcagtacggattttgcatttttg

SEQ ID NO: 1058348 - DNA, 33 bp, Homo sapien
gtacacctggtcagtatggattttgcatttttg

SEQ ID NO: 1058349 - DNA, 33 bp, Homo sapien
tcctccatcagctctgcacattccagtgggatt

SEQ ID NO: 1058350 - DNA, 33 bp, Homo sapien
tcctccatcagctctgtacattccagtgggatt

SEQ ID NO: 1058351 - DNA, 33 bp, Homo sapien
aggcatgtctacaataccagggattacaaccag

SEQ ID NO: 1058352 - DNA, 33 bp, Homo sapien
aggcatgtctacaatatcagggattacaaccag

SEQ ID NO: 1058353 - DNA, 33 bp, Homo sapien
atggttttggtaagaactgtctttgctgtaaca

SEQ ID NO: 1058354 - DNA, 33 bp, Homo sapien
atggttttggtaagaattgtctttgctgtaaca

SEQ ID NO: 1058355 - DNA, 33 bp, Homo sapien
taagggtaaaattttaagccattgcgtattgag

SEQ ID NO: 1058356 - DNA, 33 bp, Homo sapien
taagggtaaaattttaggccattgcgtattgag

SEQ ID NO: 1058357 - DNA, 33 bp, Homo sapien
tacaggtttactagtcgaataagccaatattgt

SEQ ID NO: 1058358 - DNA, 33 bp, Homo sapien
tacaggtttactagtctaataagccaatattgt

SEQ ID NO: 1058359 - DNA, 33 bp, Homo sapien
gcttgtccttaaacccaaacacaaagacccagg

SEQ ID NO: 1058360 - DNA, 33 bp, Homo sapien
gcttgtccttaaacccgaacacaaagacccagg

SEQ ID NO: 1058361 - DNA, 33 bp, Homo sapien
aatcagtgtatatcaccctcactatcactatct

SEQ ID NO: 1058362 - DNA, 33 bp, Homo sapien
aatcagtgtatatcactctcactatcactatct

SEQ ID NO: 1058363 - DNA, 33 bp, Homo sapien
gtcctgagaattaagactattgccttactaggg

SEQ ID NO: 1058364 - DNA, 33 bp, Homo sapien
gtcctgagaattaagattattgccttactaggg

SEQ ID NO: 1058365 - DNA, 33 bp, Homo sapien
aatggtctgccattgagggttatgggggacaaa

SEQ ID NO: 1058366 - DNA, 33 bp, Homo sapien
aatggtctgccattgatggttatgggggacaaa

SEQ ID NO: 1058367 - DNA, 33 bp, Homo sapien
ataaaaggaatcttaccccaccatgtaacccct

SEQ ID NO: 1058368 - DNA, 33 bp, Homo sapien
ataaaaggaatcttactccaccatgtaacccct

SEQ ID NO: 1058369 - DNA, 33 bp, Homo sapien
cgcagacatgcacaaacacaccaggctaatttt

SEQ ID NO: 1058370 - DNA, 33 bp, Homo sapien
cgcagacatgcacaaatacaccaggctaatttt

SEQ ID NO: 1058371 - DNA, 33 bp, Homo sapien
tgataatgaccgtaaccgtgggaatgagggtga

SEQ ID NO: 1058372 - DNA, 33 bp, Homo sapien
tgataatgaccgtaactgtgggaatgagggtga

SEQ ID NO: 1058373 - DNA, 33 bp, Homo sapien; identical to SEQ ID NO: 1058371

SEQ ID NO: 1058374 - DNA, 33 bp, Homo sapien; identical to SEQ ID NO: 1058372

SEQ ID NO: 1058375 - DNA, 33 bp, Homo sapien
tcctaactgcatttatcaggtttttgtttttgt

SEQ ID NO: 1058376 - DNA, 33 bp, Homo sapien
tcctaactgcatttattaggtttttgtttttgt

SEQ ID NO: 1058377 - DNA, 33 bp, Homo sapien
gaaaatgtttattcctgaagaggcaagcttagg

SEQ ID NO: 1058378 - DNA, 33 bp, Homo sapien
gaaaatgtttattccttaagaggcaagcttagg

SEQ ID NO: 1058379 - DNA, 33 bp, Homo sapien
tggttctcaaataccacagaagatgcaaaaggt

SEQ ID NO: 1058380 - DNA, 33 bp, Homo sapien
tggttctcaaataccagagaagatgcaaaaggt

SEQ ID NO: 1058381 - DNA, 33 bp, Homo sapien; identical to SEQ ID NO: 1058379

SEQ ID NO: 1058382 - DNA, 33 bp, Homo sapien; identical to SEQ ID NO: 1058380

SEQ ID NO: 1058383 - DNA, 33 bp, Homo sapien
tttggaagaatcgaaacaatcagagcgtgcgta

SEQ ID NO: 1058384 - DNA, 33 bp, Homo sapien
tttggaagaatcgaaagaatcagagcgtgcgta

SEQ ID NO: 1058385 - DNA, 33 bp, Homo sapien; identical to SEQ ID NO: 1058383

SEQ ID NO: 1058386 - DNA, 33 bp, Homo sapien; identical to SEQ ID NO: 1058384

SEQ ID NO: 1058387 - DNA, 33 bp, Homo sapien
ggtattggttacatccaccttagccaatccttc

SEQ ID NO: 1058388 - DNA, 33 bp, Homo sapien
ggtattggttacatccgccttagccaatccttc

SEQ ID NO: 1058389 - DNA, 33 bp, Homo sapien; identical to SEQ ID NO: 1058387

SEQ ID NO: 1058390 - DNA, 33 bp, Homo sapien; identical to SEQ ID NO: 1058388

SEQ ID NO: 1058391 - DNA, 33 bp, Homo sapien
atagattggatattaaaacggatatagttgaaa

SEQ ID NO: 1058392 - DNA, 33 bp, Homo sapien
atagattggatattaagacggatatagttgaaa

SEQ ID NO: 1058393 - DNA, 33 bp, Homo sapien
cgatgttagcatttccactgtattttcttgcag

SEQ ID NO: 1058394 - DNA, 33 bp, Homo sapien
cgatgttagcatttccgctgtattttcttgcag

SEQ ID NO: 1058395 - DNA, 33 bp, Homo sapien
acaccaagtaccagtaaaaggatctcccatctg

SEQ ID NO: 1058396 - DNA, 33 bp, Homo sapien
acaccaagtaccagtataaggatctcccatctg

SEQ ID NO: 1058397 - DNA, 33 bp, Homo sapien
acaaagtgagactccaggtgaagaagaaaaaaa

SEQ ID NO: 1058398 - DNA, 33 bp, Homo sapien
acaaagtgagactccatgtgaagaagaaaaaaa

SEQ ID NO: 1058399 - DNA, 33 bp, Homo sapien
tattttaggataaaaacgtattgtcactcagac

SEQ ID NO: 1058400 - DNA, 33 bp, Homo sapien
tattttaggataaaaatgtattgtcactcagac

SEQ ID NO: 1058401 - DNA, 33 bp, Homo sapien
atcttgagttggcataagcacttcctgacatta

SEQ ID NO: 1058402 - DNA, 33 bp, Homo sapien
atcttgagttggcataggcacttcctgacatta

SEQ ID NO: 1058403 - DNA, 33 bp, Homo sapien
ttcattcattcaacaaatagtcgaggcaatata

SEQ ID NO: 1058404 - DNA, 33 bp, Homo sapien
ttcattcattcaacaagtagtcgaggcaatata

SEQ ID NO: 1058405 - DNA, 33 bp, Homo sapien
tctgtttccttgggaacctgagctaaaacaatg

SEQ ID NO: 1058406 - DNA, 33 bp, Homo sapien
tctgtttccttgggaatctgagctaaaacaatg

SEQ ID NO: 1058407 - DNA, 33 bp, Homo sapien
atattatagtgtaagacatcttgaattggcata

SEQ ID NO: 1058408 - DNA, 33 bp, Homo sapien
atattatagtgtaagagatcttgaattggcata

SEQ ID NO: 1058409 - DNA, 33 bp, Homo sapien
ggtaagagtgggagaacatcaaaaatgccctca

SEQ ID NO: 1058410 - DNA, 33 bp, Homo sapien
ggtaagagtgggagaatatcaaaaatgccctca

SEQ ID NO: 1058411 - DNA, 33 bp, Homo sapien
ggcggttagaaactgacaggaaagatttaagat

SEQ ID NO: 1058412 - DNA, 33 bp, Homo sapien
ggcggttagaaactgagaggaaagatttaagat

SEQ ID NO: 1058413 - DNA, 33 bp, Homo sapien
ccttgaggttttagaacaagaaaatcttgctga

SEQ ID NO: 1058414 - DNA, 33 bp, Homo sapien
ccttgaggttttagaagaagaaaatcttgctga

SEQ ID NO: 1058415 - DNA, 33 bp, Homo sapien
gaaaagagctcacatacattgaacacaaattct

SEQ ID NO: 1058416 - DNA, 33 bp, Homo sapien
gaaaagagctcacatatattgaacacaaattct

SEQ ID NO: 1058417 - DNA, 33 bp, Homo sapien
ctgggagtcctcttcacggccgtcagtctaggc

SEQ ID NO: 1058418 - DNA, 33 bp, Homo sapien
ctgggagtcctcttcatggccgtcagtctaggc

SEQ ID NO: 1058419 - DNA, 33 bp, Homo sapien
tccggtctctgaccacaaaaataaccacacccc

SEQ ID NO: 1058420 - DNA, 33 bp, Homo sapien
tccggtctctgaccacgaaaataaccacacccc

SEQ ID NO: 1058421 - DNA, 33 bp, Homo sapien
gatgttgtccttcacaaggagtaagagccagga

SEQ ID NO: 1058422 - DNA, 33 bp, Homo sapien
gatgttgtccttcacagggagtaagagccagga

SEQ ID NO: 1058423 - DNA, 33 bp, Homo sapien
tgctaccagcatagtacgaggtttccattgctc

SEQ ID NO: 1058424 - DNA, 33 bp, Homo sapien
tgctaccagcatagtatgaggtttccattgctc

SEQ ID NO: 1058425 - DNA, 33 bp, Homo sapien
cattcagtcagtaataccgctctgtgctcaccc

SEQ ID NO: 1058426 - DNA, 33 bp, Homo sapien
cattcagtcagtaatatcgctctgtgctcaccc

SEQ ID NO: 1058427 - DNA, 33 bp, Homo sapien
gaaaatggagatgtgacaaaatagcgagacgga

SEQ ID NO: 1058428 - DNA, 33 bp, Homo sapien
gaaaatggagatgtgagaaaatagcgagacgga

SEQ ID NO: 1058429 - DNA, 33 bp, Homo sapien
aggtaggtatgacattaaagccccattttgaag

SEQ ID NO: 1058430 - DNA, 33 bp, Homo sapien
aggtaggtatgacatttaagccccattttgaag

SEQ ID NO: 1058431 - DNA, 33 bp, Homo sapien
aaactcatcttggtggcacttttcttgactcac

SEQ ID NO: 1058432 - DNA, 33 bp, Homo sapien
aaactcatcttggtggtacttttcttgactcac

SEQ ID NO: 1058433 - DNA, 33 bp, Homo sapien
gagccaccagccggaacctcagttagctgtggt

SEQ ID NO: 1058434 - DNA, 33 bp, Homo sapien
gagccaccagccggaatctcagttagctgtggt

SEQ ID NO: 1058435 - DNA, 33 bp, Homo sapien
gatctgttcatggatacactgagtttgagatct

SEQ ID NO: 1058436 - DNA, 33 bp, Homo sapien
gatctgttcatggatatactgagtttgagatct

SEQ ID NO: 1058437 - DNA, 33 bp, Homo sapien
aatagaacaaaaaagacggaggaaggtggaatt

SEQ ID NO: 1058438 - DNA, 33 bp, Homo sapien
aatagaacaaaaaagatggaggaaggtggaatt

SEQ ID NO: 1058439 - DNA, 33 bp, Homo sapien
cagctcaggatagatcacaggacgtatgtgaca

SEQ ID NO: 1058440 - DNA, 33 bp, Homo sapien
cagctcaggatagatcgcaggacgtatgtgaca

SEQ ID NO: 1058441 - DNA, 33 bp, Homo sapien
ggctgatctggtttccagaaagggctctcttag

SEQ ID NO: 1058442 - DNA, 33 bp, Homo sapien
ggctgatctggtttccggaaagggctctcttag

SEQ ID NO: 1058443 - DNA, 33 bp, Homo sapien
taaaactaccgatgaaatggttactgttatcac

SEQ ID NO: 1058444 - DNA, 33 bp, Homo sapien
taaaactaccgatgaagtggttactgttatcac

SEQ ID NO: 1058445 - DNA, 33 bp, Homo sapien
gaagtgtcacatctaaagttgcaccattcgcat

SEQ ID NO: 1058446 - DNA, 33 bp, Homo sapien
gaagtgtcacatctaacgttgcaccattcgcat

SEQ ID NO: 1058447 - DNA, 33 bp, Homo sapien
gggcatggaggaagacaatatgcaaacaaaaga

SEQ ID NO: 1058448 - DNA, 33 bp, Homo sapien
gggcatggaggaagactatatgcaaacaaaaga

SEQ ID NO: 1058449 - DNA, 33 bp, Homo sapien
aataggagaagccatcaaggcaggagcagagcc

SEQ ID NO: 1058450 - DNA, 33 bp, Homo sapien
aataggagaagccatcgaggcaggagcagagcc

SEQ ID NO: 1058451 - DNA, 33 bp, Homo sapien
gaaccttccatagcacgccctctaattagcctc

SEQ ID NO: 1058452 - DNA, 33 bp, Homo sapien
gaaccttccatagcactccctctaattagcctc

SEQ ID NO: 1058453 - DNA, 33 bp, Homo sapien
tattaatccacaccagacatccgggacacagag

SEQ ID NO: 1058454 - DNA, 33 bp, Homo sapien
tattaatccacaccaggcatccgggacacagag

SEQ ID NO: 1058455 - DNA, 33 bp, Homo sapien
gttcgaattaagattacagtgagagtttatagg

SEQ ID NO: 1058456 - DNA, 33 bp, Homo sapien
gttcgaattaagattagagtgagagtttatagg

SEQ ID NO: 1058457 - DNA, 33 bp, Homo sapien
gttgctaagagacagaaactgcataagcaaggc

SEQ ID NO: 1058458 - DNA, 33 bp, Homo sapien
gttgctaagagacagagactgcataagcaaggc

SEQ ID NO: 1058459 - DNA, 33 bp, Homo sapien
gaattcagtacagaaacgaggagacagagaggt

SEQ ID NO: 1058460 - DNA, 33 bp, Homo sapien
gaattcagtacagaaatgaggagacagagaggt

SEQ ID NO: 1058461 - DNA, 33 bp, Homo sapien
ggcttcaagttgacaactgcccctctatccagg

SEQ ID NO: 1058462 - DNA, 33 bp, Homo sapien
ggcttcaagttgacaattgcccctctatccagg

SEQ ID NO: 1058463 - DNA, 33 bp, Homo sapien
agcatgaatggccaataaatagtaaaagtaatc

SEQ ID NO: 1058464 - DNA, 33 bp, Homo sapien
agcatgaatggccaatgaatagtaaaagtaatc

SEQ ID NO: 1058465 - DNA, 33 bp, Homo sapien
acacagtgtatactcaaatttcgccagttctcc

SEQ ID NO: 1058466 - DNA, 33 bp, Homo sapien
acacagtgtatactcacatttcgccagttctcc

SEQ ID NO: 1058467 - DNA, 33 bp, Homo sapien
gtcgcttggataagtaagctaccggccaatgtc

SEQ ID NO: 1058468 - DNA, 33 bp, Homo sapien
gtcgcttggataagtatgctaccggccaatgtc

SEQ ID NO: 1058469 - DNA, 33 bp, Homo sapien
gtgtctatttttgtgaatatgcttcttctagtt

SEQ ID NO: 1058470 - DNA, 33 bp, Homo sapien
gtgtctatttttgtgattatgcttcttctagtt

SEQ ID NO: 1058471 - DNA, 33 bp, Homo sapien
tagtcatgccatataacagtctaagtgctagga

SEQ ID NO: 1058472 - DNA, 33 bp, Homo sapien
tagtcatgccatataagagtctaagtgctagga

SEQ ID NO: 1058473 - DNA, 33 bp, Homo sapien; identical to SEQ ID NO: 1058471

SEQ ID NO: 1058474 - DNA, 33 bp, Homo sapien; identical to SEQ ID NO: 1058472

SEQ ID NO: 1058475 - DNA, 33 bp, Homo sapien
aaaatttcaacatttcaccatcctattcactct

SEQ ID NO: 1058476 - DNA, 33 bp, Homo sapien
aaaatttcaacatttcgccatcctattcactct

SEQ ID NO: 1058477 - DNA, 33 bp, Homo sapien; identical to SEQ ID NO: 1058475

SEQ ID NO: 1058478 - DNA, 33 bp, Homo sapien; identical to SEQ ID NO: 1058476

SEQ ID NO: 1058479 - DNA, 33 bp, Homo sapien
actaatagaaaacatcaaattaacgttcaagca

SEQ ID NO: 1058480 - DNA, 33 bp, Homo sapien
actaatagaaaacatcgaattaacgttcaagca

SEQ ID NO: 1058481 - DNA, 33 bp, Homo sapien; identical to SEQ ID NO: 1058475

SEQ ID NO: 1058482 - DNA, 33 bp, Homo sapien; identical to SEQ ID NO: 1058476

SEQ ID NO: 1058483 - DNA, 33 bp, Homo sapien; identical to SEQ ID NO: 1058475

SEQ ID NO: 1058484 - DNA, 33 bp, Homo sapien; identical to SEQ ID NO: 1058476

SEQ ID NO: 1058485 - DNA, 33 bp, Homo sapien
aacctacagaatcataccatttttgaataagaa

SEQ ID NO: 1058486 - DNA, 33 bp, Homo sapien
aacctacagaatcatatcatttttgaataagaa

SEQ ID NO: 1058487 - DNA, 33 bp, Homo sapien
tagggtccaaatctgaaagaagcattctagaaa

SEQ ID NO: 1058488 - DNA, 33 bp, Homo sapien
tagggtccaaatctgagagaagcattctagaaa

SEQ ID NO: 1058489 - DNA, 33 bp, Homo sapien
attatgacaatggctccatttatttttaaaata

SEQ ID NO: 1058490 - DNA, 33 bp, Homo sapien
attatgacaatggctctatttatttttaaaata

SEQ ID NO: 1058491 - DNA, 33 bp, Homo sapien
tagtaatagcggtagaagtctggaatcgggcag

SEQ ID NO: 1058492 - DNA, 33 bp, Homo sapien
tagtaatagcggtagaggtctggaatcgggcag

SEQ ID NO: 1058493 - DNA, 33 bp, Homo sapien
ggtgcaggtgtctggaccaggacttctgggaca

SEQ ID NO: 1058494 - DNA, 33 bp, Homo sapien
ggtgcaggtgtctggatcaggacttctgggaca

SEQ ID NO: 1058495 - DNA, 33 bp, Homo sapien
catctcaaagtttccccaaggtcaaatcgcttt

SEQ ID NO: 1058496 - DNA, 33 bp, Homo sapien
catctcaaagtttccctaaggtcaaatcgcttt

SEQ ID NO: 1058497 - DNA, 33 bp, Homo sapien
tgtctgaataacattaactttttgtaaagcatc

SEQ ID NO: 1058498 - DNA, 33 bp, Homo sapien
tgtctgaataacattatctttttgtaaagcatc

SEQ ID NO: 1058499 - DNA, 33 bp, Homo sapien
gagcctgtgtgatgaaatggtacagccctgctg

SEQ ID NO: 1058500 - DNA, 33 bp, Homo sapien
gagcctgtgtgatgaactggtacagccctgctg

SEQ ID NO: 1058501 - DNA, 33 bp, Homo sapien
accatttaaattgtgacccatatactaagagga

SEQ ID NO: 1058502 - DNA, 33 bp, Homo sapien
accatttaaattgtgatccatatactaagagga

SEQ ID NO: 1058503 - DNA, 33 bp, Homo sapien
aacttcagatgcagagacattccctttcaagag

SEQ ID NO: 1058504 - DNA, 33 bp, Homo sapien
aacttcagatgcagaggcattccctttcaagag

SEQ ID NO: 1058505 - DNA, 33 bp, Homo sapien
gttttttcttgttgcaaaagtgtgcatgattgc

SEQ ID NO: 1058506 - DNA, 33 bp, Homo sapien
gttttttcttgttgcagaagtgtgcatgattgc

SEQ ID NO: 1058507 - DNA, 33 bp, Homo sapien
agagggagggaagagacatgaaaacaatggagc

SEQ ID NO: 1058508 - DNA, 33 bp, Homo sapien
agagggagggaagagatatgaaaacaatggagc

SEQ ID NO: 1058509 - DNA, 33 bp, Homo sapien
attcttgctacaactgaatgaagtggatcagta

SEQ ID NO: 1058510 - DNA, 33 bp, Homo sapien
attcttgctacaactggatgaagtggatcagta

SEQ ID NO: 1058511 - DNA, 33 bp, Homo sapien
agtcacctgttaataccatcacatgggtagcac

SEQ ID NO: 1058512 - DNA, 33 bp, Homo sapien
agtcacctgttaatactatcacatgggtagcac

SEQ ID NO: 1058513 - DNA, 33 bp, Homo sapien
ttctgttttattcatgcacgaatggagattgcc

SEQ ID NO: 1058514 - DNA, 33 bp, Homo sapien
ttctgttttattcatggacgaatggagattgcc

SEQ ID NO: 1058515 - DNA, 33 bp, Homo sapien
ctccaggctctaaaatgaggtttgcaggctctg

SEQ ID NO: 1058516 - DNA, 33 bp, Homo sapien
ctccaggctctaaaattaggtttgcaggctctg

SEQ ID NO: 1058517 - DNA, 33 bp, Homo sapien
aggatgtgaggtctgaactgtttgtggctctgt

SEQ ID NO: 1058518 - DNA, 33 bp, Homo sapien
aggatgtgaggtctgacctgtttgtggctctgt

SEQ ID NO: 1058519 - DNA, 33 bp, Homo sapien
gattttaacgtttgaaactgagatataagaaca

SEQ ID NO: 1058520 - DNA, 33 bp, Homo sapien
gattttaacgtttgaatctgagatataagaaca

SEQ ID NO: 1058521 - DNA, 33 bp, Homo sapien
ccacttactctgggcacactcttcatgggcttt

SEQ ID NO: 1058522 - DNA, 33 bp, Homo sapien
ccacttactctgggcatactcttcatgggcttt

SEQ ID NO: 1058523 - DNA, 33 bp, Homo sapien
gtaggaaaatgtcataaaatgatccacaaacat

SEQ ID NO: 1058524 - DNA, 33 bp, Homo sapien
gtaggaaaatgtcatagaatgatccacaaacat

SEQ ID NO: 1058525 - DNA, 33 bp, Homo sapien
aacaagtcttgaagtcaattataagtattccag

SEQ ID NO: 1058526 - DNA, 33 bp, Homo sapien
aacaagtcttgaagtcgattataagtattccag

SEQ ID NO: 1058527 - DNA, 33 bp, Homo sapien
gttaggaaatgctgataataaagtgatctgaag

SEQ ID NO: 1058528 - DNA, 33 bp, Homo sapien
gttaggaaatgctgatgataaagtgatctgaag

SEQ ID NO: 1058529 - DNA, 33 bp, Homo sapien
aaggaaatagaataaccctctgtcagtacttta

SEQ ID NO: 1058530 - DNA, 33 bp, Homo sapien
aaggaaatagaataactctctgtcagtacttta

SEQ ID NO: 1058531 - DNA, 33 bp, Homo sapien
atggagaattttaataagctaaaggttttggat

SEQ ID NO: 1058532 - DNA, 33 bp, Homo sapien
atggagaattttaataggctaaaggttttggat

SEQ ID NO: 1058533 - DNA, 33 bp, Homo sapien
tgcaaagctcaagaaccgttctctttacttcta

SEQ ID NO: 1058534 - DNA, 33 bp, Homo sapien
tgcaaagctcaagaactgttctctttacttcta

SEQ ID NO: 1058535 - DNA, 33 bp, Homo sapien
ttttctgtacagtcacagatgaacacactatat

SEQ ID NO: 1058536 - DNA, 33 bp, Homo sapien
ttttctgtacagtcacggatgaacacactatat

SEQ ID NO: 1058537 - DNA, 33 bp, Homo sapien
tatcgaaccttaagaactgatgcaagtaatact

SEQ ID NO: 1058538 - DNA, 33 bp, Homo sapien
tatcgaaccttaagaattgatgcaagtaatact

SEQ ID NO: 1058539 - DNA, 33 bp, Homo sapien
gctgtgggagccagtcaaaattttttctctttt

SEQ ID NO: 1058540 - DNA, 33 bp, Homo sapien
gctgtgggagccagtctaaattttttctctttt

SEQ ID NO: 1058541 - DNA, 33 bp, Homo sapien
tttcacccttcactatcacaccctaaaccaaag

SEQ ID NO: 1058542 - DNA, 33 bp, Homo sapien
tttcacccttcactattacaccctaaaccaaag

SEQ ID NO: 1058543 - DNA, 33 bp, Homo sapien
taatgtgatccacatacgcaattttaagtattc

SEQ ID NO: 1058544 - DNA, 33 bp, Homo sapien
taatgtgatccacataggcaattttaagtattc

SEQ ID NO: 1058545 - DNA, 33 bp, Homo sapien
gttgtgtgcggtacaaaggacgtggatgtgggc

SEQ ID NO: 1058546 - DNA, 33 bp, Homo sapien
gttgtgtgcggtacaatggacgtggatgtgggc

SEQ ID NO: 1058547 - DNA, 33 bp, Homo sapien
gatagctgtacaaatccaggaatagaatgaaaa

SEQ ID NO: 1058548 - DNA, 33 bp, Homo sapien
gatagctgtacaaatctaggaatagaatgaaaa

SEQ ID NO: 1058549 - DNA, 33 bp, Homo sapien
tagagggcaggctatacagttaaacagacctgg

SEQ ID NO: 1058550 - DNA, 33 bp, Homo sapien
tagagggcaggctatatagttaaacagacctgg

SEQ ID NO: 1058551 - DNA, 33 bp, Homo sapien
taccttgttcaacttgaaatatgatgagtttca

SEQ ID NO: 1058552 - DNA, 33 bp, Homo sapien
taccttgttcaacttggaatatgatgagtttca

SEQ ID NO: 1058553 - DNA, 33 bp, Homo sapien
ctcctctggatatgaacgtgtccctgcttgggt

SEQ ID NO: 1058554 - DNA, 33 bp, Homo sapien
ctcctctggatatgaatgtgtccctgcttgggt

SEQ ID NO: 1058555 - DNA, 33 bp, Homo sapien
tttatgttcccaaatcagatttctcccaactca

SEQ ID NO: 1058556 - DNA, 33 bp, Homo sapien
tttatgttcccaaatccgatttctcccaactca

SEQ ID NO: 1058557 - DNA, 33 bp, Homo sapien
gatacctcagttcttacagtgagaagataccag

SEQ ID NO: 1058558 - DNA, 33 bp, Homo sapien
gatacctcagttcttatagtgagaagataccag

SEQ ID NO: 1058559 - DNA, 33 bp, Homo sapien
atctggctcaaaatatcagtaatgctgaagttg

SEQ ID NO: 1058560 - DNA, 33 bp, Homo sapien
atctggctcaaaatattagtaatgctgaagttg

SEQ ID NO: 1058561 - DNA, 33 bp, Homo sapien
attctgtaggcaatttagatgatgaaatttaat

SEQ ID NO: 1058562 - DNA, 33 bp, Homo sapien
attctgtaggcaatttggatgatgaaatttaat

SEQ ID NO: 1058563 - DNA, 33 bp, Homo sapien
tgaacctaagtaatgtccattttacctattcct

SEQ ID NO: 1058564 - DNA, 33 bp, Homo sapien
tgaacctaagtaatgttcattttacctattcct

SEQ ID NO: 1058565 - DNA, 33 bp, Homo sapien
tcaattggctcctaaaagccagtcactattgga

SEQ ID NO: 1058566 - DNA, 33 bp, Homo sapien
tcaattggctcctaaaggccagtcactattgga

SEQ ID NO: 1058567 - DNA, 33 bp, Homo sapien
gttaacattaaacatgaatgtaccatatgaccc

SEQ ID NO: 1058568 - DNA, 33 bp, Homo sapien
gttaacattaaacatggatgtaccatatgaccc

SEQ ID NO: 1058569 - DNA, 33 bp, Homo sapien
cttctttcaggacttaagtttctccagcaattt

SEQ ID NO: 1058570 - DNA, 33 bp, Homo sapien
cttctttcaggacttaggtttctccagcaattt

SEQ ID NO: 1058571 - DNA, 33 bp, Homo sapien
ttgatgagggtgaggagaacttccttttagaag

SEQ ID NO: 1058572 - DNA, 33 bp, Homo sapien
ttgatgagggtgaggataacttccttttagaag

SEQ ID NO: 1058573 - DNA, 33 bp, Homo sapien
gtacatataagaaagaaggtaggtcctggggaa

SEQ ID NO: 1058574 - DNA, 33 bp, Homo sapien
gtacatataagaaagacggtaggtcctggggaa

SEQ ID NO: 1058575 - DNA, 33 bp, Homo sapien
acactgcttccaaagaaagtattttaaaatgca

SEQ ID NO: 1058576 - DNA, 33 bp, Homo sapien
acactgcttccaaagagagtattttaaaatgca

SEQ ID NO: 1058577 - DNA, 33 bp, Homo sapien
ctaaactatatcactagcctacttaaaaccctt

SEQ ID NO: 1058578 - DNA, 33 bp, Homo sapien
ctaaactatatcactatcctacttaaaaccctt

SEQ ID NO: 1058579 - DNA, 33 bp, Homo sapien
gggttaaggtaaatgacagaacaaagtcgctga

SEQ ID NO: 1058580 - DNA, 33 bp, Homo sapien
gggttaaggtaaatgatagaacaaagtcgctga

SEQ ID NO: 1058581 - DNA, 33 bp, Homo sapien
atgagatagggcatataaagctcttagaatggt

SEQ ID NO: 1058582 - DNA, 33 bp, Homo sapien
atgagatagggcatatgaagctcttagaatggt

SEQ ID NO: 1058583 - DNA, 33 bp, Homo sapien
ggggtcatgcaccaaaaggatgatgatcagaag

SEQ ID NO: 1058584 - DNA, 33 bp, Homo sapien
ggggtcatgcaccaaagggatgatgatcagaag

SEQ ID NO: 1058585 - DNA, 33 bp, Homo sapien
tgatatctcagtggaaatctaaaagtaagtcag

SEQ ID NO: 1058586 - DNA, 33 bp, Homo sapien
tgatatctcagtggaattctaaaagtaagtcag

SEQ ID NO: 1058587 - DNA, 33 bp, Homo sapien
taaagcgtatcataaaacaacaattatcaaaac

SEQ ID NO: 1058588 - DNA, 33 bp, Homo sapien
taaagcgtatcataaagcaacaattatcaaaac

SEQ ID NO: 1058589 - DNA, 33 bp, Homo sapien
tcacaccacatcatgaccagagtgtgaaatacc

SEQ ID NO: 1058590 - DNA, 33 bp, Homo sapien
tcacaccacatcatgagcagagtgtgaaatacc

SEQ ID NO: 1058591 - DNA, 33 bp, Homo sapien
aaatgggaaaaacttgaagcatgggttaagatg

SEQ ID NO: 1058592 - DNA, 33 bp, Homo sapien
aaatgggaaaaacttgcagcatgggttaagatg

SEQ ID NO: 1058593 - DNA, 33 bp, Homo sapien
caaaatggtccggctaaaactgaatcagccctt

SEQ ID NO: 1058594 - DNA, 33 bp, Homo sapien
caaaatggtccggctacaactgaatcagccctt

SEQ ID NO: 1058595 - DNA, 33 bp, Homo sapien
taagagaaggctcaaacgccaaacccagtacac

SEQ ID NO: 1058596 - DNA, 33 bp, Homo sapien
taagagaaggctcaaatgccaaacccagtacac

SEQ ID NO: 1058597 - DNA, 33 bp, Homo sapien
ctatatgcctatcataacaaattctctcccctc

SEQ ID NO: 1058598 - DNA, 33 bp, Homo sapien
ctatatgcctatcataccaaattctctcccctc

SEQ ID NO: 1058599 - DNA, 33 bp, Homo sapien
ccagtaatggatataacatgtttgcgtatttgt

SEQ ID NO: 1058600 - DNA, 33 bp, Homo sapien
ccagtaatggatataatatgtttgcgtatttgt

SEQ ID NO: 1058601 - DNA, 33 bp, Homo sapien
gggccaaggcagctaacgcttcaatcaaactgc

SEQ ID NO: 1058602 - DNA, 33 bp, Homo sapien
gggccaaggcagctaatgcttcaatcaaactgc

SEQ ID NO: 1058603 - DNA, 33 bp, Homo sapien
cctatggcaaaatgatgaaatggttggcaagtc

SEQ ID NO: 1058604 - DNA, 33 bp, Homo sapien
cctatggcaaaatgattaaatggttggcaagtc

SEQ ID NO: 1058605 - DNA, 33 bp, Homo sapien
ctctgctaatttagcccataataactctcacag

SEQ ID NO: 1058606 - DNA, 33 bp, Homo sapien
ctctgctaatttagcctataataactctcacag

SEQ ID NO: 1058607 - DNA, 33 bp, Homo sapien
caacatctagcccaaacattcggggcaggcaca

SEQ ID NO: 1058608 - DNA, 33 bp, Homo sapien
caacatctagcccaaagattcggggcaggcaca

SEQ ID NO: 1058609 - DNA, 33 bp, Homo sapien
acatatataaaaaccaatatagcagcagcagca

SEQ ID NO: 1058610 - DNA, 33 bp, Homo sapien
acatatataaaaaccagtatagcagcagcagca

SEQ ID NO: 1058611 - DNA, 33 bp, Homo sapien
tgagcaaggacttggaagataaaattggcgact

SEQ ID NO: 1058612 - DNA, 33 bp, Homo sapien
tgagcaaggacttggaggataaaattggcgact

SEQ ID NO: 1058613 - DNA, 33 bp, Homo sapien
taggcaactcaacaataatagcaggggactcta

SEQ ID NO: 1058614 - DNA, 33 bp, Homo sapien
taggcaactcaacaatgatagcaggggactcta

SEQ ID NO: 1058615 - DNA, 33 bp, Homo sapien
catgggtattaccctacaaaggaaggattatta

SEQ ID NO: 1058616 - DNA, 33 bp, Homo sapien
catgggtattaccctataaaggaaggattatta

SEQ ID NO: 1058617 - DNA, 33 bp, Homo sapien
tctgtgggagtctgtacggccatcaatagtctc

SEQ ID NO: 1058618 - DNA, 33 bp, Homo sapien
tctgtgggagtctgtagggccatcaatagtctc

SEQ ID NO: 1058619 - DNA, 33 bp, Homo sapien
agaaatacccattgtacaggtaaggaaacaagt

SEQ ID NO: 1058620 - DNA, 33 bp, Homo sapien
agaaatacccattgtataggtaaggaaacaagt

SEQ ID NO: 1058621 - DNA, 33 bp, Homo sapien
aatcctgatggagaaaatcccagagacccagat

SEQ ID NO: 1058622 - DNA, 33 bp, Homo sapien
aatcctgatggagaaagtcccagagacccagat

SEQ ID NO: 1058623 - DNA, 33 bp, Homo sapien
actgggttggcttcaacggtatataaagggacc

SEQ ID NO: 1058624 - DNA, 33 bp, Homo sapien
actgggttggcttcaatggtatataaagggacc

SEQ ID NO: 1058625 - DNA, 33 bp, Homo sapien
gaggacttctgttagaataacactcctggcctg

SEQ ID NO: 1058626 - DNA, 33 bp, Homo sapien
gaggacttctgttagactaacactcctggcctg

SEQ ID NO: 1058627 - DNA, 33 bp, Homo sapien
gctcaacatatacacaaccgtttctcaaaacct

SEQ ID NO: 1058628 - DNA, 33 bp, Homo sapien
gctcaacatatacacacccgtttctcaaaacct

SEQ ID NO: 1058629 - DNA, 33 bp, Homo sapien
gaatcaatcatctttgaatctataggctcaaca

SEQ ID NO: 1058630 - DNA, 33 bp, Homo sapien
gaatcaatcatctttgtatctataggctcaaca

SEQ ID NO: 1058631 - DNA, 33 bp, Homo sapien
tctctgcttagttttgcagaggctctcatggct

SEQ ID NO: 1058632 - DNA, 33 bp, Homo sapien
tctctgcttagttttgtagaggctctcatggct

SEQ ID NO: 1058633 - DNA, 33 bp, Homo sapien
gaacaggccttactacaatatgccagggtgctt

SEQ ID NO: 1058634 - DNA, 33 bp, Homo sapien
gaacaggccttactacgatatgccagggtgctt

SEQ ID NO: 1058635 - DNA, 33 bp, Homo sapien
tgcaaagtaatttctgacacccacaaaggtcaa

SEQ ID NO: 1058636 - DNA, 33 bp, Homo sapien
tgcaaagtaatttctggcacccacaaaggtcaa

SEQ ID NO: 1058637 - DNA, 33 bp, Homo sapien
ttctttgaccacaactaagtatgaattgacatt

SEQ ID NO: 1058638 - DNA, 33 bp, Homo sapien
ttctttgaccacaacttagtatgaattgacatt

SEQ ID NO: 1058639 - DNA, 33 bp, Homo sapien
catcccagttcagttggaagatatatggggagc

SEQ ID NO: 1058640 - DNA, 33 bp, Homo sapien
catcccagttcagttgtaagatatatggggagc

SEQ ID NO: 1058641 - DNA, 33 bp, Homo sapien
gaccactcagctataaggtgtcaaggaggagtg

SEQ ID NO: 1058642 - DNA, 33 bp, Homo sapien
gaccactcagctataatgtgtcaaggaggagtg

SEQ ID NO: 1058643 - DNA, 33 bp, Homo sapien
gccaaacagctagccacgtagctctagcgatat

SEQ ID NO: 1058644 - DNA, 33 bp, Homo sapien
gccaaacagctagccatgtagctctagcgatat

SEQ ID NO: 1058645 - DNA, 33 bp, Homo sapien
tgctaggtatgccagaacataagcatcctatgg

SEQ ID NO: 1058646 - DNA, 33 bp, Homo sapien
tgctaggtatgccagaccataagcatcctatgg

SEQ ID NO: 1058647 - DNA, 33 bp, Homo sapien
actgagcttgcaataaatgatttttagctattg

SEQ ID NO: 1058648 - DNA, 33 bp, Homo sapien
actgagcttgcaataagtgatttttagctattg

SEQ ID NO: 1058649 - DNA, 33 bp, Homo sapien
ctgatttgatccataaatatttatcagacttca

SEQ ID NO: 1058650 - DNA, 33 bp, Homo sapien
ctgatttgatccataagtatttatcagacttca

SEQ ID NO: 1058651 - DNA, 33 bp, Homo sapien
tttcatttggatgataacttaatgttgtcctta

SEQ ID NO: 1058652 - DNA, 33 bp, Homo sapien
tttcatttggatgatatcttaatgttgtcctta

SEQ ID NO: 1058653 - DNA, 33 bp, Homo sapien
agaaagcttgggcccacagccaacaaaagcaga

SEQ ID NO: 1058654 - DNA, 33 bp, Homo sapien
agaaagcttgggcccatagccaacaaaagcaga

SEQ ID NO: 1058655 - DNA, 33 bp, Homo sapien
cagtgtttcaggaagaagaaaatgatgaactgt

SEQ ID NO: 1058656 - DNA, 33 bp, Homo sapien
cagtgtttcaggaagacgaaaatgatgaactgt

SEQ ID NO: 1058657 - DNA, 33 bp, Homo sapien
actcatctcagttgtccagtgctatgaagggaa

SEQ ID NO: 1058658 - DNA, 33 bp, Homo sapien
actcatctcagttgtcgagtgctatgaagggaa

SEQ ID NO: 1058659 - DNA, 33 bp, Homo sapien
ctatgagagctcctcacgatgtttctgggatct

SEQ ID NO: 1058660 - DNA, 33 bp, Homo sapien
ctatgagagctcctcatgatgtttctgggatct

SEQ ID NO: 1058661 - DNA, 33 bp, Homo sapien
gaaagaagttctgatacaagtcactgatactga

SEQ ID NO: 1058662 - DNA, 33 bp, Homo sapien
gaaagaagttctgatataagtcactgatactga

SEQ ID NO: 1058663 - DNA, 33 bp, Homo sapien
tcacaacaaccctctaaaatggtgctattaata

SEQ ID NO: 1058664 - DNA, 33 bp, Homo sapien
tcacaacaaccctctacaatggtgctattaata

SEQ ID NO: 1058665 - DNA, 33 bp, Homo sapien
aggaccatcttgaaagccttagtgttcaacaac

SEQ ID NO: 1058666 - DNA, 33 bp, Homo sapien
aggaccatcttgaaaggcttagtgttcaacaac

SEQ ID NO: 1058667 - DNA, 33 bp, Homo sapien
ctactgtatttcttaacgaaagctactatctta

SEQ ID NO: 1058668 - DNA, 33 bp, Homo sapien
ctactgtatttcttaatgaaagctactatctta

SEQ ID NO: 1058669 - DNA, 33 bp, Homo sapien
ggatgctgctttgtgaataagagctttaatcca

SEQ ID NO: 1058670 - DNA, 33 bp, Homo sapien
ggatgctgctttgtgactaagagctttaatcca

SEQ ID NO: 1058671 - DNA, 33 bp, Homo sapien
ggttattttcaggcccactatgttttgaggaag

SEQ ID NO: 1058672 - DNA, 33 bp, Homo sapien
ggttattttcaggcccgctatgttttgaggaag

SEQ ID NO: 1058673 - DNA, 33 bp, Homo sapien
ttcaactgcatcttacccttttctatattataa

SEQ ID NO: 1058674 - DNA, 33 bp, Homo sapien
ttcaactgcatcttactcttttctatattataa

SEQ ID NO: 1058675 - DNA, 33 bp, Homo sapien
taaacccggagtgagcacgttattaggaaggat

SEQ ID NO: 1058676 - DNA, 33 bp, Homo sapien
taaacccggagtgagcgcgttattaggaaggat

SEQ ID NO: 1058677 - DNA, 33 bp, Homo sapien
ttaattaggaaggccccagttagtattcctggg

SEQ ID NO: 1058678 - DNA, 33 bp, Homo sapien
ttaattaggaaggccctagttagtattcctggg

SEQ ID NO: 1058679 - DNA, 33 bp, Homo sapien
ctccttgtctggttccactcatttttcatcatt

SEQ ID NO: 1058680 - DNA, 33 bp, Homo sapien
ctccttgtctggttcctctcatttttcatcatt

SEQ ID NO: 1058681 - DNA, 33 bp, Homo sapien
aaaactcatttattaactcacagttttcatggc

SEQ ID NO: 1058682 - DNA, 33 bp, Homo sapien
aaaactcatttattaattcacagttttcatggc

SEQ ID NO: 1058683 - DNA, 33 bp, Homo sapien
attgaagatgttttgcacaacaatatctgaatt

SEQ ID NO: 1058684 - DNA, 33 bp, Homo sapien
attgaagatgttttgcgcaacaatatctgaatt

SEQ ID NO: 1058685 - DNA, 33 bp, Homo sapien
gaaggcttggtttgaaggagttgttcttaggtc

SEQ ID NO: 1058686 - DNA, 33 bp, Homo sapien
gaaggcttggtttgaatgagttgttcttaggtc

SEQ ID NO: 1058687 - DNA, 33 bp, Homo sapien
attaggaactgataaactgattaatggaaaagt

SEQ ID NO: 1058688 - DNA, 33 bp, Homo sapien
attaggaactgataaattgattaatggaaaagt

SEQ ID NO: 1058689 - DNA, 33 bp, Homo sapien
cctcttctgtactaaacgtaggagctgtgtata

SEQ ID NO: 1058690 - DNA, 33 bp, Homo sapien
cctcttctgtactaaatgtaggagctgtgtata

SEQ ID NO: 1058691 - DNA, 33 bp, Homo sapien
tcattattgctccctaacattccattatattaa

SEQ ID NO: 1058692 - DNA, 33 bp, Homo sapien
tcattattgctccctagcattccattatattaa

SEQ ID NO: 1058693 - DNA, 33 bp, Homo sapien
aaggctttgactctcagaagctataatggccag

SEQ ID NO: 1058694 - DNA, 33 bp, Homo sapien
aaggctttgactctcataagctataatggccag

SEQ ID NO: 1058695 - DNA, 33 bp, Homo sapien
ggatgtaggaattcaacttcactcgaaacatct

SEQ ID NO: 1058696 - DNA, 33 bp, Homo sapien
ggatgtaggaattcaatttcactcgaaacatct

SEQ ID NO: 1058697 - DNA, 33 bp, Homo sapien
attaaataccttgagcgagtcttattttggttg

SEQ ID NO: 1058698 - DNA, 33 bp, Homo sapien
attaaataccttgagctagtcttattttggttg

SEQ ID NO: 1058699 - DNA, 33 bp, Homo sapien
atccccaacatgaccactacttttgcacagcat

SEQ ID NO: 1058700 - DNA, 33 bp, Homo sapien
atccccaacatgaccattacttttgcacagcat

SEQ ID NO: 1058701 - DNA, 33 bp, Homo sapien
gccagaattagaacctcaaaatccacacattct

SEQ ID NO: 1058702 - DNA, 33 bp, Homo sapien
gccagaattagaaccttaaaatccacacattct

SEQ ID NO: 1058703 - DNA, 33 bp, Homo sapien
tggctctaaaaacaacaccatcataatactaat

SEQ ID NO: 1058704 - DNA, 33 bp, Homo sapien
tggctctaaaaacaacgccatcataatactaat

SEQ ID NO: 1058705 - DNA, 33 bp, Homo sapien
tctcaaaatccacaaacatggaacgtcatttca

SEQ ID NO: 1058706 - DNA, 33 bp, Homo sapien
tctcaaaatccacaaagatggaacgtcatttca

SEQ ID NO: 1058707 - DNA, 33 bp, Homo sapien
agctatgcagccttagccgagttaatatctttg

SEQ ID NO: 1058708 - DNA, 33 bp, Homo sapien
agctatgcagccttaggcgagttaatatctttg

SEQ ID NO: 1058709 - DNA, 33 bp, Homo sapien
attatctacacaaagaaacaccttcagcaaaac

SEQ ID NO: 1058710 - DNA, 33 bp, Homo sapien
attatctacacaaagagacaccttcagcaaaac

SEQ ID NO: 1058711 - DNA, 33 bp, Homo sapien
tttcaatgcaaagtcccgaactcactttaactt

SEQ ID NO: 1058712 - DNA, 33 bp, Homo sapien
tttcaatgcaaagtcctgaactcactttaactt

SEQ ID NO: 1058713 - DNA, 33 bp, Homo sapien
catcaagtggtgattccaattgcagccgctgta

SEQ ID NO: 1058714 - DNA, 33 bp, Homo sapien
catcaagtggtgattctaattgcagccgctgta

SEQ ID NO: 1058715 - DNA, 33 bp, Homo sapien
cttccacgagaaatagaagggatgcattgtaag

SEQ ID NO: 1058716 - DNA, 33 bp, Homo sapien
cttccacgagaaatagcagggatgcattgtaag

SEQ ID NO: 1058717 - DNA, 33 bp, Homo sapien
ctgtgtctcataaaaactgatttgtacttacaa

SEQ ID NO: 1058718 - DNA, 33 bp, Homo sapien
ctgtgtctcataaaaattgatttgtacttacaa

SEQ ID NO: 1058719 - DNA, 33 bp, Homo sapien
ctttaaataatgaccaactttgtgtaatatctc

SEQ ID NO: 1058720 - DNA, 33 bp, Homo sapien
ctttaaataatgaccacctttgtgtaatatctc

SEQ ID NO: 1058721 - DNA, 33 bp, Homo sapien
gtatttaagacctttcaagggaactagctagta

SEQ ID NO: 1058722 - DNA, 33 bp, Homo sapien
gtatttaagacctttctagggaactagctagta

SEQ ID NO: 1058723 - DNA, 33 bp, Homo sapien
gtcagaagattataacagcatggaaaaaattag

SEQ ID NO: 1058724 - DNA, 33 bp, Homo sapien
gtcagaagattataacggcatggaaaaaattag

SEQ ID NO: 1058725 - DNA, 33 bp, Homo sapien
aaagtctgaccataccaagtgttataagaatgt

SEQ ID NO: 1058726 - DNA, 33 bp, Homo sapien
aaagtctgaccataccgagtgttataagaatgt

SEQ ID NO: 1058727 - DNA, 33 bp, Homo sapien
caaacaacagcactcaatgaagtaattggttag

SEQ ID NO: 1058728 - DNA, 33 bp, Homo sapien
caaacaacagcactcagtgaagtaattggttag

SEQ ID NO: 1058729 - DNA, 33 bp, Homo sapien
gtaaataatctctctcaatcttgtttggtgtcc

SEQ ID NO: 1058730 - DNA, 33 bp, Homo sapien
gtaaataatctctctcgatcttgtttggtgtcc

SEQ ID NO: 1058731 - DNA, 33 bp, Homo sapien
ctgttttgtgcaattgccaagttgcctgtaaag

SEQ ID NO: 1058732 - DNA, 33 bp, Homo sapien
ctgttttgtgcaattgtcaagttgcctgtaaag

SEQ ID NO: 1058733 - DNA, 33 bp, Homo sapien
ctgagtattttgaggaacccaagaagcagtgtt

SEQ ID NO: 1058734 - DNA, 33 bp, Homo sapien
ctgagtattttgaggatcccaagaagcagtgtt

SEQ ID NO: 1058735 - DNA, 33 bp, Homo sapien
attatgtaagccagtcacttgaatgtgtatgtg

SEQ ID NO: 1058736 - DNA, 33 bp, Homo sapien
attatgtaagccagtcccttgaatgtgtatgtg

SEQ ID NO: 1058737 - DNA, 33 bp, Homo sapien
tggacacagataattacagtactgatgtgtggg

SEQ ID NO: 1058738 - DNA, 33 bp, Homo sapien
tggacacagataattagagtactgatgtgtggg

SEQ ID NO: 1058739 - DNA, 33 bp, Homo sapien
aagaactgctcctgcaaagaaaagggttaattg

SEQ ID NO: 1058740 - DNA, 33 bp, Homo sapien
aagaactgctcctgcagagaaaagggttaattg

SEQ ID NO: 1058741 - DNA, 33 bp, Homo sapien
ttaattatcattttgcagaataaagagttggag

SEQ ID NO: 1058742 - DNA, 33 bp, Homo sapien
ttaattatcattttgcggaataaagagttggag

SEQ ID NO: 1058743 - DNA, 33 bp, Homo sapien
atgctgagaaaatttacagcagtgaatgagaaa

SEQ ID NO: 1058744 - DNA, 33 bp, Homo sapien
atgctgagaaaatttatagcagtgaatgagaaa

SEQ ID NO: 1058745 - DNA, 33 bp, Homo sapien
aggatttgcttattcaatcagcatttatgaaac

SEQ ID NO: 1058746 - DNA, 33 bp, Homo sapien
aggatttgcttattcagtcagcatttatgaaac

SEQ ID NO: 1058747 - DNA, 33 bp, Homo sapien
gcatgtgatattttcacgtatgtttctgagaca

SEQ ID NO: 1058748 - DNA, 33 bp, Homo sapien
gcatgtgatattttcatgtatgtttctgagaca

SEQ ID NO: 1058749 - DNA, 33 bp, Homo sapien
aaaagaataatgcaacaaaacattggcaaaata

SEQ ID NO: 1058750 - DNA, 33 bp, Homo sapien
aaaagaataatgcaacgaaacattggcaaaata

SEQ ID NO: 1058751 - DNA, 33 bp, Homo sapien
gcaaatccagtgagaaaggagaagcagagctct

SEQ ID NO: 1058752 - DNA, 33 bp, Homo sapien
gcaaatccagtgagaagggagaagcagagctct

SEQ ID NO: 1058753 - DNA, 33 bp, Homo sapien
cgtagactttctaataacattgttttgtttttt

SEQ ID NO: 1058754 - DNA, 33 bp, Homo sapien
cgtagactttctaatatcattgttttgtttttt

SEQ ID NO: 1058755 - DNA, 33 bp, Homo sapien
ttagcatagtgttttcaaagtttatccatatta

SEQ ID NO: 1058756 - DNA, 33 bp, Homo sapien
ttagcatagtgttttcgaagtttatccatatta

SEQ ID NO: 1058757 - DNA, 33 bp, Homo sapien
cccttttccttataccgccagaatttgatgtct

SEQ ID NO: 1058758 - DNA, 33 bp, Homo sapien
cccttttccttatacctccagaatttgatgtct

SEQ ID NO: 1058759 - DNA, 33 bp, Homo sapien
gtctacgttcttcccaatccttgctttcctctc

SEQ ID NO: 1058760 - DNA, 33 bp, Homo sapien
gtctacgttcttcccagtccttgctttcctctc

SEQ ID NO: 1058761 - DNA, 33 bp, Homo sapien
agtaggggtagaggtacagtcttctctggtatt

SEQ ID NO: 1058762 - DNA, 33 bp, Homo sapien
agtaggggtagaggtatagtcttctctggtatt

SEQ ID NO: 1058763 - DNA, 33 bp, Homo sapien
cacaccttttgtcctacaataacttgcagataa

SEQ ID NO: 1058764 - DNA, 33 bp, Homo sapien
cacaccttttgtcctataataacttgcagataa

SEQ ID NO: 1058765 - DNA, 33 bp, Homo sapien
ggccagattgaagaaaagccttaaagacaagct

SEQ ID NO: 1058766 - DNA, 33 bp, Homo sapien
ggccagattgaagaaaggccttaaagacaagct

SEQ ID NO: 1058767 - DNA, 33 bp, Homo sapien
ggtactgctacaaaagcagactaatggaataca

SEQ ID NO: 1058768 - DNA, 33 bp, Homo sapien
ggtactgctacaaaagtagactaatggaataca

SEQ ID NO: 1058769 - DNA, 33 bp, Homo sapien
tcttagacttgtctgcactgaaccttcagcaat

SEQ ID NO: 1058770 - DNA, 33 bp, Homo sapien
tcttagacttgtctgcgctgaaccttcagcaat

SEQ ID NO: 1058771 - DNA, 33 bp, Homo sapien
atagtactggaaaccccagctagagtagttaga

SEQ ID NO: 1058772 - DNA, 33 bp, Homo sapien
atagtactggaaaccctagctagagtagttaga

SEQ ID NO: 1058773 - DNA, 33 bp, Homo sapien
gggtatacacccaaaaaaatacagatcattcta

SEQ ID NO: 1058774 - DNA, 33 bp, Homo sapien
gggtatacacccaaaacaatacagatcattcta

SEQ ID NO: 1058775 - DNA, 33 bp, Homo sapien
atttgtataagagttcaagaaggacttttatta

SEQ ID NO: 1058776 - DNA, 33 bp, Homo sapien
atttgtataagagttcgagaaggacttttatta

SEQ ID NO: 1058777 - DNA, 33 bp, Homo sapien
aagtgttagaggtttccaaatgcggaacattag

SEQ ID NO: 1058778 - DNA, 33 bp, Homo sapien
aagtgttagaggtttctaaatgcggaacattag

SEQ ID NO: 1058779 - DNA, 33 bp, Homo sapien
aagcaaatgctaaaggaacttgttaccactaga

SEQ ID NO: 1058780 - DNA, 33 bp, Homo sapien
aagcaaatgctaaaggtacttgttaccactaga

SEQ ID NO: 1058781 - DNA, 33 bp, Homo sapien
taagattatataaagcaactgaatctgtgactg

SEQ ID NO: 1058782 - DNA, 33 bp, Homo sapien
taagattatataaagcgactgaatctgtgactg

SEQ ID NO: 1058783 - DNA, 33 bp, Homo sapien
gaataggtcagagaacgaaaaaatacacctgca

SEQ ID NO: 1058784 - DNA, 33 bp, Homo sapien
gaataggtcagagaactaaaaaatacacctgca

SEQ ID NO: 1058785 - DNA, 33 bp, Homo sapien
gatgtgatgggtcagaatcaggagcactatcag

SEQ ID NO: 1058786 - DNA, 33 bp, Homo sapien
gatgtgatgggtcagattcaggagcactatcag

SEQ ID NO: 1058787 - DNA, 33 bp, Homo sapien
cgtaagtggccaattccaacagaagccagtgag

SEQ ID NO: 1058788 - DNA, 33 bp, Homo sapien
cgtaagtggccaattcgaacagaagccagtgag

SEQ ID NO: 1058789 - DNA, 33 bp, Homo sapien
tgaaatatgagttggcaaggaagattaacatgt

SEQ ID NO: 1058790 - DNA, 33 bp, Homo sapien
tgaaatatgagttggcgaggaagattaacatgt

SEQ ID NO: 1058791 - DNA, 33 bp, Homo sapien
atttcctcaatggataacattttaaaactaaac

SEQ ID NO: 1058792 - DNA, 33 bp, Homo sapien
atttcctcaatggatagcattttaaaactaaac

SEQ ID NO: 1058793 - DNA, 33 bp, Homo sapien
ccctttacctgcaacaaaaatataacaggaggg

SEQ ID NO: 1058794 - DNA, 33 bp, Homo sapien
ccctttacctgcaacagaaatataacaggaggg

SEQ ID NO: 1058795 - DNA, 33 bp, Homo sapien
ccgatgagcgcttcccaactcttttccttttct

SEQ ID NO: 1058796 - DNA, 33 bp, Homo sapien
ccgatgagcgcttcccgactcttttccttttct

SEQ ID NO: 1058797 - DNA, 33 bp, Homo sapien; identical to SEQ ID NO: 1058795

SEQ ID NO: 1058798 - DNA, 33 bp, Homo sapien; identical to SEQ ID NO: 1058796

SEQ ID NO: 1058799 - DNA, 33 bp, Homo sapien
aatacatgtactcacaacattaacaataatccc

SEQ ID NO: 1058800 - DNA, 33 bp, Homo sapien
aatacatgtactcacagcattaacaataatccc

SEQ ID NO: 1058801 - DNA, 33 bp, Homo sapien; identical to SEQ ID NO: 1058799

SEQ ID NO: 1058802 - DNA, 33 bp, Homo sapien; identical to SEQ ID NO: 1058800

SEQ ID NO: 1058803 - DNA, 33 bp, Homo sapien
cctttgtgaatgtataaaagggataggtttgga

SEQ ID NO: 1058804 - DNA, 33 bp, Homo sapien
cctttgtgaatgtatagaagggataggtttgga

SEQ ID NO: 1058805 - DNA, 33 bp, Homo sapien
tgactcctagtcagcaacacagaaggaagtcat

SEQ ID NO: 1058806 - DNA, 33 bp, Homo sapien
tgactcctagtcagcagcacagaaggaagtcat

SEQ ID NO: 1058807 - DNA, 33 bp, Homo sapien
ctgtgcaaggagacatcatgacttccttctgtg

SEQ ID NO: 1058808 - DNA, 33 bp, Homo sapien
ctgtgcaaggagacattatgacttccttctgtg

SEQ ID NO: 1058809 - DNA, 33 bp, Homo sapien
ggtcgatttctctcaccatttcaggtgtgccct

SEQ ID NO: 1058810 - DNA, 33 bp, Homo sapien
ggtcgatttctctcactatttcaggtgtgccct

SEQ ID NO: 1058811 - DNA, 33 bp, Homo sapien
cacattcattaaaaaaaattgtgctgattagaa

SEQ ID NO: 1058812 - DNA, 33 bp, Homo sapien
cacattcattaaaaaagattgtgctgattagaa

SEQ ID NO: 1058813 - DNA, 33 bp, Homo sapien
gaggtagacagatggaccttagcctccaagaga

SEQ ID NO: 1058814 - DNA, 33 bp, Homo sapien
gaggtagacagatggatcttagcctccaagaga

SEQ ID NO: 1058815 - DNA, 33 bp, Homo sapien
cctagcatcagaaagcacagtgtgtaaatccag

SEQ ID NO: 1058816 - DNA, 33 bp, Homo sapien
cctagcatcagaaagcgcagtgtgtaaatccag

SEQ ID NO: 1058817 - DNA, 33 bp, Homo sapien
cagaaacaacagaaaccagaaaacagtggagca

SEQ ID NO: 1058818 - DNA, 33 bp, Homo sapien
cagaaacaacagaaacgagaaaacagtggagca

SEQ ID NO: 1058819 - DNA, 33 bp, Homo sapien
gggcatgacagtgtggaaagccaattaggaaag

SEQ ID NO: 1058820 - DNA, 33 bp, Homo sapien
gggcatgacagtgtgggaagccaattaggaaag

SEQ ID NO: 1058821 - DNA, 33 bp, Homo sapien
ctccaggggattcagacgcaagtgggttccagg

SEQ ID NO: 1058822 - DNA, 33 bp, Homo sapien
ctccaggggattcagatgcaagtgggttccagg

SEQ ID NO: 1058823 - DNA, 33 bp, Homo sapien
cggtagcaagagggtaaactcccatctcacaag

SEQ ID NO: 1058824 - DNA, 33 bp, Homo sapien
cggtagcaagagggtagactcccatctcacaag

SEQ ID NO: 1058825 - DNA, 33 bp, Homo sapien
aactcaaaaaactagacataggagaaatgtacc

SEQ ID NO: 1058826 - DNA, 33 bp, Homo sapien
aactcaaaaaactagatataggagaaatgtacc

SEQ ID NO: 1058827 - DNA, 33 bp, Homo sapien
cagaagtccattaagccgagaatgaccttgttt

SEQ ID NO: 1058828 - DNA, 33 bp, Homo sapien
cagaagtccattaagctgagaatgaccttgttt

SEQ ID NO: 1058829 - DNA, 33 bp, Homo sapien
tggtgttctttccaaaaacaactccactctaaa

SEQ ID NO: 1058830 - DNA, 33 bp, Homo sapien
tggtgttctttccaaacacaactccactctaaa

SEQ ID NO: 1058831 - DNA, 33 bp, Homo sapien
ttattggcttttggcagtaaggttctgctggta

SEQ ID NO: 1058832 - DNA, 33 bp, Homo sapien
ttattggcttttggcattaaggttctgctggta

SEQ ID NO: 1058833 - DNA, 33 bp, Homo sapien
tggataagatcactataaccttaaccagacaaa

SEQ ID NO: 1058834 - DNA, 33 bp, Homo sapien
tggataagatcactatgaccttaaccagacaaa

SEQ ID NO: 1058835 - DNA, 33 bp, Homo sapien
ttggcacagaaacagacaagtagaccaatacaa

SEQ ID NO: 1058836 - DNA, 33 bp, Homo sapien
ttggcacagaaacagagaagtagaccaatacaa

SEQ ID NO: 1058837 - DNA, 33 bp, Homo sapien
aaaataatctatggcaatctgggaactgtcctt

SEQ ID NO: 1058838 - DNA, 33 bp, Homo sapien
aaaataatctatggcagtctgggaactgtcctt

SEQ ID NO: 1058839 - DNA, 33 bp, Homo sapien
aagagcaagttaaagactcaagaaatgggggat

SEQ ID NO: 1058840 - DNA, 33 bp, Homo sapien
aagagcaagttaaagattcaagaaatgggggat

SEQ ID NO: 1058841 - DNA, 33 bp, Homo sapien
aaaagaggggagagtcaatacagtaacacagga

SEQ ID NO: 1058842 - DNA, 33 bp, Homo sapien
aaaagaggggagagtcgatacagtaacacagga

SEQ ID NO: 1058843 - DNA, 33 bp, Homo sapien
aagaacaggacaaagacgtatagacctgatccc

SEQ ID NO: 1058844 - DNA, 33 bp, Homo sapien
aagaacaggacaaagatgtatagacctgatccc

SEQ ID NO: 1058845 - DNA, 33 bp, Homo sapien
atggtcaagtaccactaaaaactggaggtcatg

SEQ ID NO: 1058846 - DNA, 33 bp, Homo sapien
atggtcaagtaccacttaaaactggaggtcatg

SEQ ID NO: 1058847 - DNA, 33 bp, Homo sapien
ggtggcagaagaacacaggatagcatattaaag

SEQ ID NO: 1058848 - DNA, 33 bp, Homo sapien
ggtggcagaagaacacgggatagcatattaaag

SEQ ID NO: 1058849 - DNA, 33 bp, Homo sapien
atgaacataggtacaaaatgaggtagacccaca

SEQ ID NO: 1058850 - DNA, 33 bp, Homo sapien
atgaacataggtacaagatgaggtagacccaca

SEQ ID NO: 1058851 - DNA, 33 bp, Homo sapien
acacaataaatacaataaaagtacacggatgtt

SEQ ID NO: 1058852 - DNA, 33 bp, Homo sapien
acacaataaatacaatcaaagtacacggatgtt

SEQ ID NO: 1058853 - DNA, 33 bp, Homo sapien
atgctgttttctcaaacaggttttctgtggttc

SEQ ID NO: 1058854 - DNA, 33 bp, Homo sapien
atgctgttttctcaaataggttttctgtggttc

SEQ ID NO: 1058855 - DNA, 33 bp, Homo sapien
attttttcccacaagaagggaacgacatggaac

SEQ ID NO: 1058856 - DNA, 33 bp, Homo sapien
attttttcccacaagacgggaacgacatggaac

SEQ ID NO: 1058857 - DNA, 33 bp, Homo sapien
gcccttgcctcttgaccagatttcctgccatgc

SEQ ID NO: 1058858 - DNA, 33 bp, Homo sapien
gcccttgcctcttgactagatttcctgccatgc

SEQ ID NO: 1058859 - DNA, 33 bp, Homo sapien
cctattggctttacctcaaaatatattccactc

SEQ ID NO: 1058860 - DNA, 33 bp, Homo sapien
cctattggctttacctgaaaatatattccactc

SEQ ID NO: 1058861 - DNA, 33 bp, Homo sapien
cgtaagggaatatagaccatttgagaattttcc

SEQ ID NO: 1058862 - DNA, 33 bp, Homo sapien
cgtaagggaatatagatcatttgagaattttcc

SEQ ID NO: 1058863 - DNA, 33 bp, Homo sapien
cagagaagagagtaaaagaaggcagaaggtcat

SEQ ID NO: 1058864 - DNA, 33 bp, Homo sapien
cagagaagagagtaaaggaaggcagaaggtcat

SEQ ID NO: 1058865 - DNA, 33 bp, Homo sapien
aaagtagcaagcctctcaaaggtaaaaagtgtc

SEQ ID NO: 1058866 - DNA, 33 bp, Homo sapien
aaagtagcaagcctcttaaaggtaaaaagtgtc

SEQ ID NO: 1058867 - DNA, 33 bp, Homo sapien
tgctatcacgagagacaaaagatggcaagagtg

SEQ ID NO: 1058868 - DNA, 33 bp, Homo sapien
tgctatcacgagagacgaaagatggcaagagtg

SEQ ID NO: 1058869 - DNA, 33 bp, Homo sapien
cccaggttgcagtagccgaaggaacctccaatc

SEQ ID NO: 1058870 - DNA, 33 bp, Homo sapien
cccaggttgcagtagctgaaggaacctccaatc

SEQ ID NO: 1058871 - DNA, 33 bp, Homo sapien
cttttcagagccttcccatgcttgtttgttgag

SEQ ID NO: 1058872 - DNA, 33 bp, Homo sapien
cttttcagagccttcctatgcttgtttgttgag

SEQ ID NO: 1058873 - DNA, 33 bp, Homo sapien
caaaaagaaaagaagacgatatgcataatcacc

SEQ ID NO: 1058874 - DNA, 33 bp, Homo sapien
caaaaagaaaagaagatgatatgcataatcacc

SEQ ID NO: 1058875 - DNA, 33 bp, Homo sapien
aatgctagaagctcgcactttgattctccagat

SEQ ID NO: 1058876 - DNA, 33 bp, Homo sapien
aatgctagaagctcgcgctttgattctccagat

SEQ ID NO: 1058877 - DNA, 33 bp, Homo sapien
tcttcatcaaataaccactcaccttttgagaag

SEQ ID NO: 1058878 - DNA, 33 bp, Homo sapien
tcttcatcaaataaccgctcaccttttgagaag

SEQ ID NO: 1058879 - DNA, 33 bp, Homo sapien
gatggattgtatgtgacggttgacagagtgggt

SEQ ID NO: 1058880 - DNA, 33 bp, Homo sapien
gatggattgtatgtgatggttgacagagtgggt

SEQ ID NO: 1058881 - DNA, 33 bp, Homo sapien
aaagcctcaaacagggaataattgaaagtgtgt

SEQ ID NO: 1058882 - DNA, 33 bp, Homo sapien
aaagcctcaaacaggggataattgaaagtgtgt

SEQ ID NO: 1058883 - DNA, 33 bp, Homo sapien
aagtctccatccagtcaccttaaaggaaagccc

SEQ ID NO: 1058884 - DNA, 33 bp, Homo sapien
aagtctccatccagtcgccttaaaggaaagccc

SEQ ID NO: 1058885 - DNA, 33 bp, Homo sapien
ctcaatagatgcacaaaaagcatttaagaaaat

SEQ ID NO: 1058886 - DNA, 33 bp, Homo sapien
ctcaatagatgcacaacaagcatttaagaaaat

SEQ ID NO: 1058887 - DNA, 33 bp, Homo sapien
ctgccactcaggatacacatccttatcaaaagc

SEQ ID NO: 1058888 - DNA, 33 bp, Homo sapien
ctgccactcaggatacgcatccttatcaaaagc

SEQ ID NO: 1058889 - DNA, 33 bp, Homo sapien
atactccaaaactctccgacatgttagagaaaa

SEQ ID NO: 1058890 - DNA, 33 bp, Homo sapien
atactccaaaactctcggacatgttagagaaaa

SEQ ID NO: 1058891 - DNA, 33 bp, Homo sapien
cattactggtatgggacgaaaacggaagccact

SEQ ID NO: 1058892 - DNA, 33 bp, Homo sapien
cattactggtatgggatgaaaacggaagccact

SEQ ID NO: 1058893 - DNA, 33 bp, Homo sapien
tccccactaagaagtaagtcatttctggtttaa

SEQ ID NO: 1058894 - DNA, 33 bp, Homo sapien
tccccactaagaagtaggtcatttctggtttaa

SEQ ID NO: 1058895 - DNA, 33 bp, Homo sapien
tgaccccaaatcccatcacacctttcctactga

SEQ ID NO: 1058896 - DNA, 33 bp, Homo sapien
tgaccccaaatcccatgacacctttcctactga

SEQ ID NO: 1058897 - DNA, 33 bp, Homo sapien
ttttggtaaatcagtaaattgatacatttagca

SEQ ID NO: 1058898 - DNA, 33 bp, Homo sapien
ttttggtaaatcagtacattgatacatttagca

SEQ ID NO: 1058899 - DNA, 33 bp, Homo sapien
atcctcaaccctctgaagtagaaaataggtcag

SEQ ID NO: 1058900 - DNA, 33 bp, Homo sapien
atcctcaaccctctgaggtagaaaataggtcag

SEQ ID NO: 1058901 - DNA, 33 bp, Homo sapien
ctgtacaatagtggagaaaactagttggcaagc

SEQ ID NO: 1058902 - DNA, 33 bp, Homo sapien
ctgtacaatagtggaggaaactagttggcaagc

SEQ ID NO: 1058903 - DNA, 33 bp, Homo sapien
gagaatgactggtgtacagtaatgatatgttag

SEQ ID NO: 1058904 - DNA, 33 bp, Homo sapien
gagaatgactggtgtatagtaatgatatgttag

SEQ ID NO: 1058905 - DNA, 33 bp, Homo sapien
agttattctaggacaaacaatactacatttact

SEQ ID NO: 1058906 - DNA, 33 bp, Homo sapien
agttattctaggacaagcaatactacatttact

SEQ ID NO: 1058907 - DNA, 33 bp, Homo sapien
gtctcatttccaaccacaggtagtctaaagaag

SEQ ID NO: 1058908 - DNA, 33 bp, Homo sapien
gtctcatttccaaccataggtagtctaaagaag

SEQ ID NO: 1058909 - DNA, 33 bp, Homo sapien
ttctgaggaccttcagacagtagtacataccac

SEQ ID NO: 1058910 - DNA, 33 bp, Homo sapien
ttctgaggaccttcaggcagtagtacataccac

SEQ ID NO: 1058911 - DNA, 33 bp, Homo sapien
tcttctttcatactctaaacactgagaaaggct

SEQ ID NO: 1058912 - DNA, 33 bp, Homo sapien
tcttctttcatactctgaacactgagaaaggct

SEQ ID NO: 1058913 - DNA, 33 bp, Homo sapien
ttcagcatcttgagtaccatgttcaactaagcc

SEQ ID NO: 1058914 - DNA, 33 bp, Homo sapien
ttcagcatcttgagtatcatgttcaactaagcc

SEQ ID NO: 1058915 - DNA, 33 bp, Homo sapien
ttgtagacatcaacaacattttggctaaataac

SEQ ID NO: 1058916 - DNA, 33 bp, Homo sapien
ttgtagacatcaacaatattttggctaaataac

SEQ ID NO: 1058917 - DNA, 33 bp, Homo sapien
agcaatactagtccaacaagtgcatcaccctca

SEQ ID NO: 1058918 - DNA, 33 bp, Homo sapien
agcaatactagtccaagaagtgcatcaccctca

SEQ ID NO: 1058919 - DNA, 33 bp, Homo sapien
tctctacaggtattcacgcaggggtctcaactt

SEQ ID NO: 1058920 - DNA, 33 bp, Homo sapien
tctctacaggtattcaggcaggggtctcaactt

SEQ ID NO: 1058921 - DNA, 33 bp, Homo sapien
tacacaccatgtcacaactgcaaacatggttac

SEQ ID NO: 1058922 - DNA, 33 bp, Homo sapien
tacacaccatgtcacacctgcaaacatggttac

SEQ ID NO: 1058923 - DNA, 33 bp, Homo sapien
ctgccccttccatcaacggatttataattcccc

SEQ ID NO: 1058924 - DNA, 33 bp, Homo sapien
ctgccccttccatcaatggatttataattcccc

SEQ ID NO: 1058925 - DNA, 33 bp, Homo sapien
ttaagtcactaatttaaaaaactatgatacttg

SEQ ID NO: 1058926 - DNA, 33 bp, Homo sapien
ttaagtcactaatttataaaactatgatacttg

SEQ ID NO: 1058927 - DNA, 33 bp, Homo sapien
gagacaagttgaattcaaaacgcctgggggtac

SEQ ID NO: 1058928 - DNA, 33 bp, Homo sapien
gagacaagttgaattcgaaacgcctgggggtac

SEQ ID NO: 1058929 - DNA, 33 bp, Homo sapien
acaggcacgctcttaaccactagtacaacttat

SEQ ID NO: 1058930 - DNA, 33 bp, Homo sapien
acaggcacgctcttaatcactagtacaacttat

SEQ ID NO: 1058931 - DNA, 33 bp, Homo sapien
tggaaaaaaaaattgaatatcacagaagagaca

SEQ ID NO: 1058932 - DNA, 33 bp, Homo sapien
tggaaaaaaaaattgagtatcacagaagagaca

SEQ ID NO: 1058933 - DNA, 33 bp, Homo sapien
gaagagacaccgtgagacacatacagagaggca

SEQ ID NO: 1058934 - DNA, 33 bp, Homo sapien
gaagagacaccgtgaggcacatacagagaggca

SEQ ID NO: 1058935 - DNA, 33 bp, Homo sapien
aatctgcaccaaaaaaaatgttcatcctagctt

SEQ ID NO: 1058936 - DNA, 33 bp, Homo sapien
aatctgcaccaaaaaacatgttcatcctagctt

SEQ ID NO: 1058937 - DNA, 33 bp, Homo sapien
ttcgtggctaagagacccgaagatggatcacat

SEQ ID NO: 1058938 - DNA, 33 bp, Homo sapien
ttcgtggctaagagacgcgaagatggatcacat

SEQ ID NO: 1058939 - DNA, 33 bp, Homo sapien
ttttggaatgaagatacagttccccagataaag

SEQ ID NO: 1058940 - DNA, 33 bp, Homo sapien
ttttggaatgaagatatagttccccagataaag

SEQ ID NO: 1058941 - DNA, 33 bp, Homo sapien
agtcattccagtggaaaatgaacgtaacctgca

SEQ ID NO: 1058942 - DNA, 33 bp, Homo sapien
agtcattccagtggaagatgaacgtaacctgca

SEQ ID NO: 1058943 - DNA, 33 bp, Homo sapien
gaggttctggagaaaacgaaatgcctttacact

SEQ ID NO: 1058944 - DNA, 33 bp, Homo sapien
gaggttctggagaaaatgaaatgcctttacact

SEQ ID NO: 1058945 - DNA, 33 bp, Homo sapien
tacataaagtgaggtaaactggtgctggggcac

SEQ ID NO: 1058946 - DNA, 33 bp, Homo sapien
tacataaagtgaggtacactggtgctggggcac

SEQ ID NO: 1058947 - DNA, 33 bp, Homo sapien
cacaacaacatgctgacgcagagacacacagaa

SEQ ID NO: 1058948 - DNA, 33 bp, Homo sapien
cacaacaacatgctgatgcagagacacacagaa

SEQ ID NO: 1058949 - DNA, 33 bp, Homo sapien
cagtacttgtatgcccaagtgtgttgatgtcca

SEQ ID NO: 1058950 - DNA, 33 bp, Homo sapien
cagtacttgtatgcccgagtgtgttgatgtcca

SEQ ID NO: 1058951 - DNA, 33 bp, Homo sapien
cagtagttgtcagagacgattgcttaaaagcta

SEQ ID NO: 1058952 - DNA, 33 bp, Homo sapien
cagtagttgtcagagatgattgcttaaaagcta

SEQ ID NO: 1058953 - DNA, 33 bp, Homo sapien
aaatcctgctttcaggaagccctccttgactgc

SEQ ID NO: 1058954 - DNA, 33 bp, Homo sapien
aaatcctgctttcagggagccctccttgactgc

SEQ ID NO: 1058955 - DNA, 33 bp, Homo sapien; identical to SEQ ID NO: 1058877

SEQ ID NO: 1058956 - DNA, 33 bp, Homo sapien; identical to SEQ ID NO: 1058878

SEQ ID NO: 1058957 - DNA, 33 bp, Homo sapien
agccatgagataaaataacatgtgaggtaatgt

SEQ ID NO: 1058958 - DNA, 33 bp, Homo sapien
agccatgagataaaatgacatgtgaggtaatgt

SEQ ID NO: 1058959 - DNA, 33 bp, Homo sapien
ttcttatagatgctagaccttttcagatgcata

SEQ ID NO: 1058960 - DNA, 33 bp, Homo sapien
ttcttatagatgctaggccttttcagatgcata

SEQ ID NO: 1058961 - DNA, 33 bp, Homo sapien
tgcatggaagaataatcaggtattttgagaagt

SEQ ID NO: 1058962 - DNA, 33 bp, Homo sapien
tgcatggaagaataatgaggtattttgagaagt

SEQ ID NO: 1058963 - DNA, 33 bp, Homo sapien
attgctttgggcgataagtccattttaatattg

SEQ ID NO: 1058964 - DNA, 33 bp, Homo sapien
attgctttgggcgatacgtccattttaatattg

SEQ ID NO: 1058965 - DNA, 33 bp, Homo sapien
tttgcaattctctgacagccagtaatggtgagc

SEQ ID NO: 1058966 - DNA, 33 bp, Homo sapien
tttgcaattctctgacggccagtaatggtgagc

SEQ ID NO: 1058967 - DNA, 33 bp, Homo sapien
acactgatatataacaaaactctacactttcat

SEQ ID NO: 1058968 - DNA, 33 bp, Homo sapien
acactgatatataacagaactctacactttcat

SEQ ID NO: 1058969 - DNA, 33 bp, Homo sapien
ctaacagtcttagttcactgagcttcaggtgct

SEQ ID NO: 1058970 - DNA, 33 bp, Homo sapien
ctaacagtcttagttcgctgagcttcaggtgct

SEQ ID NO: 1058971 - DNA, 33 bp, Homo sapien
tttaaggtgtctcagaacaatgcaaaattatat

SEQ ID NO: 1058972 - DNA, 33 bp, Homo sapien
tttaaggtgtctcagagcaatgcaaaattatat

SEQ ID NO: 1058973 - DNA, 33 bp, Homo sapien
atcagcatccacattgaaaatggaatctcatgc

SEQ ID NO: 1058974 - DNA, 33 bp, Homo sapien
atcagcatccacattggaaatggaatctcatgc

SEQ ID NO: 1058975 - DNA, 33 bp, Homo sapien
tatacccatggagagaagaaattcataagatga

SEQ ID NO: 1058976 - DNA, 33 bp, Homo sapien
tatacccatggagagaggaaattcataagatga

SEQ ID NO: 1058977 - DNA, 33 bp, Homo sapien
ctataatctcaatcacgcagttcattcaaaacc

SEQ ID NO: 1058978 - DNA, 33 bp, Homo sapien
ctataatctcaatcactcagttcattcaaaacc

SEQ ID NO: 1058979 - DNA, 33 bp, Homo sapien
cttggacttctgagtacaggaaaaacgcattga

SEQ ID NO: 1058980 - DNA, 33 bp, Homo sapien
cttggacttctgagtagaggaaaaacgcattga

SEQ ID NO: 1058981 - DNA, 33 bp, Homo sapien
tggcagatttatttgaaatggctcttctccaat

SEQ ID NO: 1058982 - DNA, 33 bp, Homo sapien
tggcagatttatttgagatggctcttctccaat

SEQ ID NO: 1058983 - DNA, 33 bp, Homo sapien
aaattgcaaatcaatacgtagactatggtctta

SEQ ID NO: 1058984 - DNA, 33 bp, Homo sapien
aaattgcaaatcaatatgtagactatggtctta

SEQ ID NO: 1058985 - DNA, 33 bp, Homo sapien
caggatagatttcaaactgcaacattgtgcact

SEQ ID NO: 1058986 - DNA, 33 bp, Homo sapien
caggatagatttcaaagtgcaacattgtgcact

SEQ ID NO: 1058987 - DNA, 33 bp, Homo sapien
aatggtaactaacttacggaaaatgtaggtata

SEQ ID NO: 1058988 - DNA, 33 bp, Homo sapien
aatggtaactaacttatggaaaatgtaggtata

SEQ ID NO: 1058989 - DNA, 33 bp, Homo sapien
aaaggatttaaactgcaattattcattaagagc

SEQ ID NO: 1058990 - DNA, 33 bp, Homo sapien
aaaggatttaaactgccattattcattaagagc

SEQ ID NO: 1058991 - DNA, 33 bp, Homo sapien
ggtaatgtttgggctacagagtagtgctgctat

SEQ ID NO: 1058992 - DNA, 33 bp, Homo sapien
ggtaatgtttgggctatagagtagtgctgctat

SEQ ID NO: 1058993 - DNA, 33 bp, Homo sapien
ttaatatatattgacccgataatttgatcaacg

SEQ ID NO: 1058994 - DNA, 33 bp, Homo sapien
ttaatatatattgacctgataatttgatcaacg

SEQ ID NO: 1058995 - DNA, 33 bp, Homo sapien; identical to SEQ ID NO: 1058993

SEQ ID NO: 1058996 - DNA, 33 bp, Homo sapien; identical to SEQ ID NO: 1058994

SEQ ID NO: 1058997 - DNA, 33 bp, Homo sapien
caactgtaccttaagacgaggaaaggcctgtgg

SEQ ID NO: 1058998 - DNA, 33 bp, Homo sapien
caactgtaccttaagatgaggaaaggcctgtgg

SEQ ID NO: 1058999 - DNA, 33 bp, Homo sapien
caacagagactactcccgagtttttaaggaaga

SEQ ID NO: 1059000 - DNA, 33 bp, Homo sapien
caacagagactactcctgagtttttaaggaaga

SEQ ID NO: 1059001 - DNA, 33 bp, Homo sapien
ccatgccatcttataacctcccaccaaaaacat

SEQ ID NO: 1059002 - DNA, 33 bp, Homo sapien
ccatgccatcttataatctcccaccaaaaacat

SEQ ID NO: 1059003 - DNA, 33 bp, Homo sapien
cattgagatcctaagaaacaatgatgacaatga

SEQ ID NO: 1059004 - DNA, 33 bp, Homo sapien
cattgagatcctaagagacaatgatgacaatga

SEQ ID NO: 1059005 - DNA, 33 bp, Homo sapien
ccatgacacaagttcacctgtataacaaacctg

SEQ ID NO: 1059006 - DNA, 33 bp, Homo sapien
ccatgacacaagttcatctgtataacaaacctg

SEQ ID NO: 1059007 - DNA, 33 bp, Homo sapien
ttgttgagtttgttgaagatcagatggtaatag

SEQ ID NO: 1059008 - DNA, 33 bp, Homo sapien
ttgttgagtttgttgacgatcagatggtaatag

SEQ ID NO: 1059009 - DNA, 33 bp, Homo sapien
cagaaataatgctgcaaacctcacacctattac

SEQ ID NO: 1059010 - DNA, 33 bp, Homo sapien
cagaaataatgctgcacacctcacacctattac

SEQ ID NO: 1059011 - DNA, 33 bp, Homo sapien
aataactcagcctcaactatttatggcaaaaac

SEQ ID NO: 1059012 - DNA, 33 bp, Homo sapien
aataactcagcctcaagtatttatggcaaaaac

SEQ ID NO: 1059013 - DNA, 33 bp, Homo sapien
tgcttggtggccttccactggattttccctagc

SEQ ID NO: 1059014 - DNA, 33 bp, Homo sapien
tgcttggtggccttccgctggattttccctagc

SEQ ID NO: 1059015 - DNA, 33 bp, Homo sapien
atcagacagcaggatccaatgaacattaataga

SEQ ID NO: 1059016 - DNA, 33 bp, Homo sapien
atcagacagcaggatctaatgaacattaataga

SEQ ID NO: 1059017 - DNA, 33 bp, Homo sapien
gcttgcatgagggacacaattctggtaggagaa

SEQ ID NO: 1059018 - DNA, 33 bp, Homo sapien
gcttgcatgagggacataattctggtaggagaa

SEQ ID NO: 1059019 - DNA, 33 bp, Homo sapien
tggctgcctgcctgaaaggactgtacaggctgc

SEQ ID NO: 1059020 - DNA, 33 bp, Homo sapien
tggctgcctgcctgaagggactgtacaggctgc

SEQ ID NO: 1059021 - DNA, 33 bp, Homo sapien
attgggtagaaaaacacccatataggccgggca

SEQ ID NO: 1059022 - DNA, 33 bp, Homo sapien
attgggtagaaaaacatccatataggccgggca

SEQ ID NO: 1059023 - DNA, 33 bp, Homo sapien
gttcttgaagaggcaacgtgtgtgagtctaaca

SEQ ID NO: 1059024 - DNA, 33 bp, Homo sapien
gttcttgaagaggcaatgtgtgtgagtctaaca

SEQ ID NO: 1059025 - DNA, 33 bp, Homo sapien
ttccaggtgtgaacagaaaaagaggctcaggga

SEQ ID NO: 1059026 - DNA, 33 bp, Homo sapien
ttccaggtgtgaacaggaaaagaggctcaggga

SEQ ID NO: 1059027 - DNA, 33 bp, Homo sapien
agcaaagccttcatgacatttgaaataacataa

SEQ ID NO: 1059028 - DNA, 33 bp, Homo sapien
agcaaagccttcatgagatttgaaataacataa

SEQ ID NO: 1059029 - DNA, 33 bp, Homo sapien
tccacttatcttctacagagctctcaagatttg

SEQ ID NO: 1059030 - DNA, 33 bp, Homo sapien
tccacttatcttctacggagctctcaagatttg

SEQ ID NO: 1059031 - DNA, 33 bp, Homo sapien
atagacaatcttgagaataagaaagagggacaa

SEQ ID NO: 1059032 - DNA, 33 bp, Homo sapien
atagacaatcttgagagtaagaaagagggacaa

SEQ ID NO: 1059033 - DNA, 33 bp, Homo sapien
agggtagacttccacactcgatatgaaacatat

SEQ ID NO: 1059034 - DNA, 33 bp, Homo sapien
agggtagacttccacattcgatatgaaacatat

SEQ ID NO: 1059035 - DNA, 33 bp, Homo sapien
agaagtggtaaactgaagacattatatgtatag

SEQ ID NO: 1059036 - DNA, 33 bp, Homo sapien
agaagtggtaaactgaggacattatatgtatag

SEQ ID NO: 1059037 - DNA, 33 bp, Homo sapien
ctgtgaaggtctgatacggtaaaatgtgctaaa

SEQ ID NO: 1059038 - DNA, 33 bp, Homo sapien
ctgtgaaggtctgatatggtaaaatgtgctaaa

SEQ ID NO: 1059039 - DNA, 33 bp, Homo sapien
gttgtgtgccttgctagctcaatggggtttggc

SEQ ID NO: 1059040 - DNA, 33 bp, Homo sapien
gttgtgtgccttgctatctcaatggggtttggc

SEQ ID NO: 1059041 - DNA, 33 bp, Homo sapien
agattttcagtcaacaagtactgggcaacttca

SEQ ID NO: 1059042 - DNA, 33 bp, Homo sapien
agattttcagtcaacaggtactgggcaacttca

SEQ ID NO: 1059043 - DNA, 33 bp, Homo sapien
tgactgctgcactggccaatggggattccaagc

SEQ ID NO: 1059044 - DNA, 33 bp, Homo sapien
tgactgctgcactggcgaatggggattccaagc

SEQ ID NO: 1059045 - DNA, 33 bp, Homo sapien
tgaagtctacctgggacgatcgagcttagtgaa

SEQ ID NO: 1059046 - DNA, 33 bp, Homo sapien
tgaagtctacctgggatgatcgagcttagtgaa

SEQ ID NO: 1059047 - DNA, 33 bp, Homo sapien
cttagagtaagtatccagaagtgtgaacttcta

SEQ ID NO: 1059048 - DNA, 33 bp, Homo sapien
cttagagtaagtatccggaagtgtgaacttcta

SEQ ID NO: 1059049 - DNA, 33 bp, Homo sapien
gatgaacttcatagccaagaactgtcaaaaaat

SEQ ID NO: 1059050 - DNA, 33 bp, Homo sapien
gatgaacttcatagccgagaactgtcaaaaaat

SEQ ID NO: 1059051 - DNA, 33 bp, Homo sapien
aaagttgtaaatagctcaaaataagttttcttg

SEQ ID NO: 1059052 - DNA, 33 bp, Homo sapien
aaagttgtaaatagctgaaaataagttttcttg

SEQ ID NO: 1059053 - DNA, 33 bp, Homo sapien
tcagtattgtcccttcaaggtttgtcaaaaaga

SEQ ID NO: 1059054 - DNA, 33 bp, Homo sapien
tcagtattgtcccttcgaggtttgtcaaaaaga

SEQ ID NO: 1059055 - DNA, 33 bp, Homo sapien
aagctccttatatgtacgattggaaactgaaag

SEQ ID NO: 1059056 - DNA, 33 bp, Homo sapien
aagctccttatatgtaggattggaaactgaaag

SEQ ID NO: 1059057 - DNA, 33 bp, Homo sapien
gacgtttaaattagtaaatgcctgtagaacact

SEQ ID NO: 1059058 - DNA, 33 bp, Homo sapien
gacgtttaaattagtacatgcctgtagaacact

SEQ ID NO: 1059059 - DNA, 33 bp, Homo sapien
tgcagagaggttggggaatttgttatggagcat

SEQ ID NO: 1059060 - DNA, 33 bp, Homo sapien
tgcagagaggttgggggatttgttatggagcat

SEQ ID NO: 1059061 - DNA, 33 bp, Homo sapien
aaaaataggctataaggaggagtgattgaattg

SEQ ID NO: 1059062 - DNA, 33 bp, Homo sapien
aaaaataggctataagtaggagtgattgaattg

SEQ ID NO: 1059063 - DNA, 33 bp, Homo sapien
ccatagttgcaggctaaaaaagagagggtagta

SEQ ID NO: 1059064 - DNA, 33 bp, Homo sapien
ccatagttgcaggctagaaaagagagggtagta

SEQ ID NO: 1059065 - DNA, 33 bp, Homo sapien
aaaacatctatgtccaagttataactataatct

SEQ ID NO: 1059066 - DNA, 33 bp, Homo sapien
aaaacatctatgtccaggttataactataatct

SEQ ID NO: 1059067 - DNA, 33 bp, Homo sapien
atttctttattttgtaggaagagaccaatttgt

SEQ ID NO: 1059068 - DNA, 33 bp, Homo sapien
atttctttattttgtatgaagagaccaatttgt

SEQ ID NO: 1059069 - DNA, 33 bp, Homo sapien
catcatcatgagcttcaactgggtaatatgatg

SEQ ID NO: 1059070 - DNA, 33 bp, Homo sapien
catcatcatgagcttccactgggtaatatgatg

SEQ ID NO: 1059071 - DNA, 33 bp, Homo sapien
ttctactgcataaaccaatcttctctggatgcg

SEQ ID NO: 1059072 - DNA, 33 bp, Homo sapien
ttctactgcataaacctatcttctctggatgcg

SEQ ID NO: 1059073 - DNA, 33 bp, Homo sapien
tgcaggctggttgtcccaacaagtgtccagctc

SEQ ID NO: 1059074 - DNA, 33 bp, Homo sapien
tgcaggctggttgtcctaacaagtgtccagctc

SEQ ID NO: 1059075 - DNA, 33 bp, Homo sapien
acttctcagttacctgaattatcagtgcactaa

SEQ ID NO: 1059076 - DNA, 33 bp, Homo sapien
acttctcagttacctggattatcagtgcactaa

SEQ ID NO: 1059077 - DNA, 33 bp, Homo sapien
cagcttggtaagcacaatgctagagaaatgtag

SEQ ID NO: 1059078 - DNA, 33 bp, Homo sapien
cagcttggtaagcacagtgctagagaaatgtag

SEQ ID NO: 1059079 - DNA, 33 bp, Homo sapien
aagttgtgctgggaaagatacaaataattcatt

SEQ ID NO: 1059080 - DNA, 33 bp, Homo sapien
aagttgtgctgggaaatatacaaataattcatt

SEQ ID NO: 1059081 - DNA, 33 bp, Homo sapien
ggcccatcaaggtagacagagtcctcttctgaa

SEQ ID NO: 1059082 - DNA, 33 bp, Homo sapien
ggcccatcaaggtagatagagtcctcttctgaa

SEQ ID NO: 1059083 - DNA, 33 bp, Homo sapien
gaaaggagaaaacaacagctaattgcaccacct

SEQ ID NO: 1059084 - DNA, 33 bp, Homo sapien
gaaaggagaaaacaactgctaattgcaccacct

SEQ ID NO: 1059085 - DNA, 33 bp, Homo sapien
agctgtactcattatacgggaaaaattgatctt

SEQ ID NO: 1059086 - DNA, 33 bp, Homo sapien
agctgtactcattatatgggaaaaattgatctt

SEQ ID NO: 1059087 - DNA, 33 bp, Homo sapien
ttgagaatcactttcccaggttagttatttaag

SEQ ID NO: 1059088 - DNA, 33 bp, Homo sapien
ttgagaatcactttcctaggttagttatttaag

SEQ ID NO: 1059089 - DNA, 33 bp, Homo sapien
taggtgagactataaacgtagagacagcaaaat

SEQ ID NO: 1059090 - DNA, 33 bp, Homo sapien
taggtgagactataaatgtagagacagcaaaat

SEQ ID NO: 1059091 - DNA, 33 bp, Homo sapien
tggtttccccaggccaagtccctgaatatctct

SEQ ID NO: 1059092 - DNA, 33 bp, Homo sapien
tggtttccccaggccaggtccctgaatatctct

SEQ ID NO: 1059093 - DNA, 33 bp, Homo sapien
ttaatctggatacttacaaacagttgattgaga

SEQ ID NO: 1059094 - DNA, 33 bp, Homo sapien
ttaatctggatacttataaacagttgattgaga

SEQ ID NO: 1059095 - DNA, 33 bp, Homo sapien
ctaaattctcgacaagacctacatactaaaatg

SEQ ID NO: 1059096 - DNA, 33 bp, Homo sapien
ctaaattctcgacaaggcctacatactaaaatg

SEQ ID NO: 1059097 - DNA, 33 bp, Homo sapien
gcaatttttgtggggacaagggatggtccaaag

SEQ ID NO: 1059098 - DNA, 33 bp, Homo sapien
gcaatttttgtggggataagggatggtccaaag

SEQ ID NO: 1059099 - DNA, 33 bp, Homo sapien
aaagatgcaattgtcaaaagcagaatgtccaag

SEQ ID NO: 1059100 - DNA, 33 bp, Homo sapien
aaagatgcaattgtcagaagcagaatgtccaag

SEQ ID NO: 1059101 - DNA, 33 bp, Homo sapien
cccaaatttttatttccagctatgctgctctag

SEQ ID NO: 1059102 - DNA, 33 bp, Homo sapien
cccaaatttttatttcgagctatgctgctctag

SEQ ID NO: 1059103 - DNA, 33 bp, Homo sapien
gactgagtctaggacaccccaacatttaaaagt

SEQ ID NO: 1059104 - DNA, 33 bp, Homo sapien
gactgagtctaggacatcccaacatttaaaagt

SEQ ID NO: 1059105 - DNA, 33 bp, Homo sapien
ccctggttatctctacacttaggtattttattc

SEQ ID NO: 1059106 - DNA, 33 bp, Homo sapien
ccctggttatctctactcttaggtattttattc

SEQ ID NO: 1059107 - DNA, 33 bp, Homo sapien
ttctatatgccactagcaaacaatctcaaaaag

SEQ ID NO: 1059108 - DNA, 33 bp, Homo sapien
ttctatatgccactagtaaacaatctcaaaaag

SEQ ID NO: 1059109 - DNA, 33 bp, Homo sapien
atgaacagcattgtgacattgttcatcatactg

SEQ ID NO: 1059110 - DNA, 33 bp, Homo sapien
atgaacagcattgtgatattgttcatcatactg

SEQ ID NO: 1059111 - DNA, 33 bp, Homo sapien
gggttagttttgagagacgttttgaagttgatt

SEQ ID NO: 1059112 - DNA, 33 bp, Homo sapien
gggttagttttgagaggcgttttgaagttgatt

SEQ ID NO: 1059113 - DNA, 33 bp, Homo sapien
agctttctagctcaacaatctgtctaatactgt

SEQ ID NO: 1059114 - DNA, 33 bp, Homo sapien
agctttctagctcaacgatctgtctaatactgt

SEQ ID NO: 1059115 - DNA, 33 bp, Homo sapien
agaagagcttctctcaacaaaagataagaccaa

SEQ ID NO: 1059116 - DNA, 33 bp, Homo sapien
agaagagcttctctcatcaaaagataagaccaa

SEQ ID NO: 1059117 - DNA, 33 bp, Homo sapien
cctcactttgtgtcacagaaaatgattttcagg

SEQ ID NO: 1059118 - DNA, 33 bp, Homo sapien
cctcactttgtgtcacggaaaatgattttcagg

SEQ ID NO: 1059119 - DNA, 33 bp, Homo sapien
aatacataaagtacaacgcattagactaaaaaa

SEQ ID NO: 1059120 - DNA, 33 bp, Homo sapien
aatacataaagtacaatgcattagactaaaaaa

SEQ ID NO: 1059121 - DNA, 33 bp, Homo sapien
tactgagtgttcagcacggtattgaccaaaaac

SEQ ID NO: 1059122 - DNA, 33 bp, Homo sapien
tactgagtgttcagcatggtattgaccaaaaac

SEQ ID NO: 1059123 - DNA, 33 bp, Homo sapien
caaccatcagagaatacgataaacacctctatg

SEQ ID NO: 1059124 - DNA, 33 bp, Homo sapien
caaccatcagagaatatgataaacacctctatg

SEQ ID NO: 1059125 - DNA, 33 bp, Homo sapien
aactaagcataaagaaaaaggaattctcctcca

SEQ ID NO: 1059126 - DNA, 33 bp, Homo sapien
aactaagcataaagaacaaggaattctcctcca

SEQ ID NO: 1059127 - DNA, 33 bp, Homo sapien
cctctctccacaaaccaccattgcagtcagagc

SEQ ID NO: 1059128 - DNA, 33 bp, Homo sapien
cctctctccacaaaccgccattgcagtcagagc

SEQ ID NO: 1059129 - DNA, 33 bp, Homo sapien
ccactccattgtgctaccaattagtaagtctta

SEQ ID NO: 1059130 - DNA, 33 bp, Homo sapien
ccactccattgtgctatcaattagtaagtctta

SEQ ID NO: 1059131 - DNA, 33 bp, Homo sapien
atgaaaaaacacaaccagaaatgacaaagtggc

SEQ ID NO: 1059132 - DNA, 33 bp, Homo sapien
atgaaaaaacacaaccggaaatgacaaagtggc

SEQ ID NO: 1059133 - DNA, 33 bp, Homo sapien
agcttctcagaaattcacatatccaattgctgg

SEQ ID NO: 1059134 - DNA, 33 bp, Homo sapien
agcttctcagaaattcgcatatccaattgctgg

SEQ ID NO: 1059135 - DNA, 33 bp, Homo sapien
tatgaagcattaccaaaatgtggctcactattc

SEQ ID NO: 1059136 - DNA, 33 bp, Homo sapien
tatgaagcattaccaagatgtggctcactattc

SEQ ID NO: 1059137 - DNA, 33 bp, Homo sapien
atgagtcttgattagaccatgcttctcaaacaa

SEQ ID NO: 1059138 - DNA, 33 bp, Homo sapien
atgagtcttgattagatcatgcttctcaaacaa

SEQ ID NO: 1059139 - DNA, 33 bp, Homo sapien
acaattgaaagaataacgatagcataaagccac

SEQ ID NO: 1059140 - DNA, 33 bp, Homo sapien
acaattgaaagaataatgatagcataaagccac

SEQ ID NO: 1059141 - DNA, 33 bp, Homo sapien
caagttcaactcttgcagacctagcctgtgggc

SEQ ID NO: 1059142 - DNA, 33 bp, Homo sapien
caagttcaactcttgcggacctagcctgtgggc

SEQ ID NO: 1059143 - DNA, 33 bp, Homo sapien
aggctggaaaaactaaattagctgaattgcaga

SEQ ID NO: 1059144 - DNA, 33 bp, Homo sapien
aggctggaaaaactaagttagctgaattgcaga

SEQ ID NO: 1059145 - DNA, 33 bp, Homo sapien
catgatggcaggacaacttcaaacaatggaact

SEQ ID NO: 1059146 - DNA, 33 bp, Homo sapien
catgatggcaggacaatttcaaacaatggaact

SEQ ID NO: 1059147 - DNA, 33 bp, Homo sapien
tcatatccaaccaaaacaagtttcataagcaaa

SEQ ID NO: 1059148 - DNA, 33 bp, Homo sapien
tcatatccaaccaaaagaagtttcataagcaaa

SEQ ID NO: 1059149 - DNA, 33 bp, Homo sapien
attccttgctatattaagtcctaagcagcctga

SEQ ID NO: 1059150 - DNA, 33 bp, Homo sapien
attccttgctatattaggtcctaagcagcctga

SEQ ID NO: 1059151 - DNA, 33 bp, Homo sapien
ctgagctctgcactgagccgacctaacagacat

SEQ ID NO: 1059152 - DNA, 33 bp, Homo sapien
ctgagctctgcactgatccgacctaacagacat

SEQ ID NO: 1059153 - DNA, 33 bp, Homo sapien
atgatccagttgtaacaattctatttcttccat

SEQ ID NO: 1059154 - DNA, 33 bp, Homo sapien
atgatccagttgtaacgattctatttcttccat

SEQ ID NO: 1059155 - DNA, 33 bp, Homo sapien
agtagaatccgatgaacgctgaggaaactctct

SEQ ID NO: 1059156 - DNA, 33 bp, Homo sapien
agtagaatccgatgaatgctgaggaaactctct

SEQ ID NO: 1059157 - DNA, 33 bp, Homo sapien
gtttttggttgcataaacctcttcttttgggaa

SEQ ID NO: 1059158 - DNA, 33 bp, Homo sapien
gtttttggttgcataagcctcttcttttgggaa

SEQ ID NO: 1059159 - DNA, 33 bp, Homo sapien
actgcaccaattattagagttgttctgctttta

SEQ ID NO: 1059160 - DNA, 33 bp, Homo sapien
actgcaccaattattatagttgttctgctttta

SEQ ID NO: 1059161 - DNA, 33 bp, Homo sapien
ccccagtcactaataaacctccagtccttcctg

SEQ ID NO: 1059162 - DNA, 33 bp, Homo sapien
ccccagtcactaataatcctccagtccttcctg

SEQ ID NO: 1059163 - DNA, 33 bp, Homo sapien
atacattctaacctgggcattgtaccttatgga

SEQ ID NO: 1059164 - DNA, 33 bp, Homo sapien
atacattctaacctggtcattgtaccttatgga

SEQ ID NO: 1059165 - DNA, 33 bp, Homo sapien
caatgtcctgaattgagagatcaagccaataat

SEQ ID NO: 1059166 - DNA, 33 bp, Homo sapien
caatgtcctgaattgatagatcaagccaataat

SEQ ID NO: 1059167 - DNA, 33 bp, Homo sapien
aacaccacaaagatacacttcgagaagagcaac

SEQ ID NO: 1059168 - DNA, 33 bp, Homo sapien
aacaccacaaagatactcttcgagaagagcaac

SEQ ID NO: 1059169 - DNA, 33 bp, Homo sapien
tgtgcatttttgtgtaaactgctccaatgtgaa

SEQ ID NO: 1059170 - DNA, 33 bp, Homo sapien
tgtgcatttttgtgtagactgctccaatgtgaa

SEQ ID NO: 1059171 - DNA, 33 bp, Homo sapien
ccatccagactagtaacggggaaagcacaattc

SEQ ID NO: 1059172 - DNA, 33 bp, Homo sapien
ccatccagactagtaatggggaaagcacaattc

SEQ ID NO: 1059173 - DNA, 33 bp, Homo sapien
aagttgccattatcaacaacagctataaaatat

SEQ ID NO: 1059174 - DNA, 33 bp, Homo sapien
aagttgccattatcaataacagctataaaatat

SEQ ID NO: 1059175 - DNA, 33 bp, Homo sapien
cagaatagtctgagcgcatttctttttataatt

SEQ ID NO: 1059176 - DNA, 33 bp, Homo sapien
cagaatagtctgagcgtatttctttttataatt

SEQ ID NO: 1059177 - DNA, 33 bp, Homo sapien
tactgaagaatacaggaatgcatatcgctttgg

SEQ ID NO: 1059178 - DNA, 33 bp, Homo sapien
tactgaagaatacagggatgcatatcgctttgg

SEQ ID NO: 1059179 - DNA, 33 bp, Homo sapien
cctgctgccaggattccaaaggtttgtggtgag

SEQ ID NO: 1059180 - DNA, 33 bp, Homo sapien
cctgctgccaggattcgaaaggtttgtggtgag

SEQ ID NO: 1059181 - DNA, 33 bp, Homo sapien
acagaatcctgagtgacacggttcccaaacgtc

SEQ ID NO: 1059182 - DNA, 33 bp, Homo sapien
acagaatcctgagtgatacggttcccaaacgtc

SEQ ID NO: 1059183 - DNA, 33 bp, Homo sapien
gaagcaggtgattagaaatagcaacatagaagt

SEQ ID NO: 1059184 - DNA, 33 bp, Homo sapien
gaagcaggtgattagatatagcaacatagaagt

SEQ ID NO: 1059185 - DNA, 33 bp, Homo sapien
ctgcaatattcaaggcaactatggactggagta

SEQ ID NO: 1059186 - DNA, 33 bp, Homo sapien
ctgcaatattcaaggcgactatggactggagta

SEQ ID NO: 1059187 - DNA, 33 bp, Homo sapien
taatgacccatcttaccagtgatgatatgttat

SEQ ID NO: 1059188 - DNA, 33 bp, Homo sapien
taatgacccatcttactagtgatgatatgttat

SEQ ID NO: 1059189 - DNA, 33 bp, Homo sapien
aatcctctgcaaacaacggtaatttgacttctt

SEQ ID NO: 1059190 - DNA, 33 bp, Homo sapien
aatcctctgcaaacaatggtaatttgacttctt

SEQ ID NO: 1059191 - DNA, 33 bp, Homo sapien
gcgtgttctccctaaagatgttcgcttgccaac

SEQ ID NO: 1059192 - DNA, 33 bp, Homo sapien
gcgtgttctccctaaatatgttcgcttgccaac

SEQ ID NO: 1059193 - DNA, 33 bp, Homo sapien
acatcaatcacgtctgaactatatcctgtcttc

SEQ ID NO: 1059194 - DNA, 33 bp, Homo sapien
acatcaatcacgtctgtactatatcctgtcttc

SEQ ID NO: 1059195 - DNA, 33 bp, Homo sapien; identical to SEQ ID NO: 1059193

SEQ ID NO: 1059196 - DNA, 33 bp, Homo sapien; identical to SEQ ID NO: 1059194

SEQ ID NO: 1059197 - DNA, 33 bp, Homo sapien
tggctccacagatgacagtcacgtcttttcctt

SEQ ID NO: 1059198 - DNA, 33 bp, Homo sapien
tggctccacagatgactgtcacgtcttttcctt

SEQ ID NO: 1059199 - DNA, 33 bp, Homo sapien; identical to SEQ ID NO: 1059197

SEQ ID NO: 1059200 - DNA, 33 bp, Homo sapien; identical to SEQ ID NO: 1059198

SEQ ID NO: 1059201 - DNA, 33 bp, Homo sapien
ctcatggcatcacacaaggacaaggatcccaag

SEQ ID NO: 1059202 - DNA, 33 bp, Homo sapien
ctcatggcatcacacagggacaaggatcccaag

SEQ ID NO: 1059203 - DNA, 33 bp, Homo sapien
tcctgttctgcgtgtcaaaatggaggttgagcc

SEQ ID NO: 1059204 - DNA, 33 bp, Homo sapien
tcctgttctgcgtgtcgaaatggaggttgagcc

SEQ ID NO: 1059205 - DNA, 33 bp, Homo sapien
ggtgaacaaaacgatacggatttcagtgtgtac

SEQ ID NO: 1059206 - DNA, 33 bp, Homo sapien
ggtgaacaaaacgatatggatttcagtgtgtac

SEQ ID NO: 1059207 - DNA, 33 bp, Homo sapien
tggtttgataccgagcactctgggctcctcaag

SEQ ID NO: 1059208 - DNA, 33 bp, Homo sapien
tggtttgataccgagctctctgggctcctcaag

SEQ ID NO: 1059209 - DNA, 33 bp, Homo sapien
tcttcgcttgttacaaatcttcctggatgtgta

SEQ ID NO: 1059210 - DNA, 33 bp, Homo sapien
tcttcgcttgttacaagtcttcctggatgtgta

SEQ ID NO: 1059211 - DNA, 33 bp, Homo sapien
atcagaaaatgtcttcaatgtaataggtctgtg

SEQ ID NO: 1059212 - DNA, 33 bp, Homo sapien
atcagaaaatgtcttcgatgtaataggtctgtg

SEQ ID NO: 1059213 - DNA, 33 bp, Homo sapien
aactctttcatttatgcaacttctggaattatg

SEQ ID NO: 1059214 - DNA, 33 bp, Homo sapien
aactctttcatttatgtaacttctggaattatg

SEQ ID NO: 1059215 - DNA, 33 bp, Homo sapien
tctatgcatcaccatcgcaatttacatgatccc

SEQ ID NO: 1059216 - DNA, 33 bp, Homo sapien
tctatgcatcaccatctcaatttacatgatccc

SEQ ID NO: 1059217 - DNA, 33 bp, Homo sapien
tctgaccccactccataaccatctgttgctgct

SEQ ID NO: 1059218 - DNA, 33 bp, Homo sapien
tctgaccccactccattaccatctgttgctgct

SEQ ID NO: 1059219 - DNA, 33 bp, Homo sapien
aacatctcacctttcacccatagatagtgtgca

SEQ ID NO: 1059220 - DNA, 33 bp, Homo sapien
aacatctcacctttcatccatagatagtgtgca

SEQ ID NO: 1059221 - DNA, 33 bp, Homo sapien
catatcaccggttatccgaagagattggtctgt

SEQ ID NO: 1059222 - DNA, 33 bp, Homo sapien
catatcaccggttatctgaagagattggtctgt

SEQ ID NO: 1059223 - DNA, 33 bp, Homo sapien
tccttccttacttgccaggatggattgtgacct

SEQ ID NO: 1059224 - DNA, 33 bp, Homo sapien
tccttccttacttgccgggatggattgtgacct

SEQ ID NO: 1059225 - DNA, 33 bp, Homo sapien
tactctcacaatgtaacccagaccatatgggcc

SEQ ID NO: 1059226 - DNA, 33 bp, Homo sapien
tactctcacaatgtaatccagaccatatgggcc

SEQ ID NO: 1059227 - DNA, 33 bp, Homo sapien
aaggacaacactataaaatcctttaactgatgc

SEQ ID NO: 1059228 - DNA, 33 bp, Homo sapien
aaggacaacactataagatcctttaactgatgc

SEQ ID NO: 1059229 - DNA, 33 bp, Homo sapien
atggattcttcagcataaaagttgcaattctaa

SEQ ID NO: 1059230 - DNA, 33 bp, Homo sapien
atggattcttcagcatgaaagttgcaattctaa

SEQ ID NO: 1059231 - DNA, 33 bp, Homo sapien
ctgcatatagttataaaccaatgaataaatgga

SEQ ID NO: 1059232 - DNA, 33 bp, Homo sapien
ctgcatatagttataagccaatgaataaatgga

SEQ ID NO: 1059233 - DNA, 33 bp, Homo sapien
gtactcacaaaagacactcacttctccagacac

SEQ ID NO: 1059234 - DNA, 33 bp, Homo sapien
gtactcacaaaagacattcacttctccagacac

SEQ ID NO: 1059235 - DNA, 33 bp, Homo sapien
tgtaaacaaagatgctcaaaatttggattcggt

SEQ ID NO: 1059236 - DNA, 33 bp, Homo sapien
tgtaaacaaagatgctgaaaatttggattcggt

SEQ ID NO: 1059237 - DNA, 33 bp, Homo sapien
ctcttcttcgtacaaccggtagaattctgctgt

SEQ ID NO: 1059238 - DNA, 33 bp, Homo sapien
ctcttcttcgtacaactggtagaattctgctgt

SEQ ID NO: 1059239 - DNA, 33 bp, Homo sapien
ctctgctccatagaggaaatctcagataagact

SEQ ID NO: 1059240 - DNA, 33 bp, Homo sapien
ctctgctccatagagggaatctcagataagact

SEQ ID NO: 1059241 - DNA, 33 bp, Homo sapien
ataaaagtggtgcacactagcagcttttagtct

SEQ ID NO: 1059242 - DNA, 33 bp, Homo sapien
ataaaagtggtgcacattagcagcttttagtct

SEQ ID NO: 1059243 - DNA, 33 bp, Homo sapien
gaatcaacagtttcaacagacctgagtagtggg

SEQ ID NO: 1059244 - DNA, 33 bp, Homo sapien
gaatcaacagtttcaatagacctgagtagtggg

SEQ ID NO: 1059245 - DNA, 33 bp, Homo sapien
tcctcaaagatatagcagcagaaataaaatttg

SEQ ID NO: 1059246 - DNA, 33 bp, Homo sapien
tcctcaaagatatagcggcagaaataaaatttg

SEQ ID NO: 1059247 - DNA, 33 bp, Homo sapien
aactgcaaaactacacagaaacagaacaacctg

SEQ ID NO: 1059248 - DNA, 33 bp, Homo sapien
aactgcaaaactacacggaaacagaacaacctg

SEQ ID NO: 1059249 - DNA, 33 bp, Homo sapien
cttgcaaataccataactggcaaagcagtgaaa

SEQ ID NO: 1059250 - DNA, 33 bp, Homo sapien
cttgcaaataccataattggcaaagcagtgaaa

SEQ ID NO: 1059251 - DNA, 33 bp, Homo sapien
ggagaatgttgggagaggtgataggatggcgac

SEQ ID NO: 1059252 - DNA, 33 bp, Homo sapien
ggagaatgttgggagatgtgataggatggcgac

SEQ ID NO: 1059253 - DNA, 33 bp, Homo sapien
gccaccgagtcaacggccaccttcagcatgact

SEQ ID NO: 1059254 - DNA, 33 bp, Homo sapien
gccaccgagtcaacggtcaccttcagcatgact

SEQ ID NO: 1059255 - DNA, 33 bp, Homo sapien
gtgcctattgctcaaaagatgcagtctcacaag

SEQ ID NO: 1059256 - DNA, 33 bp, Homo sapien
gtgcctattgctcaaaggatgcagtctcacaag

SEQ ID NO: 1059257 - DNA, 33 bp, Homo sapien
gaacctgaaaggatataaggattaagctgctgt

SEQ ID NO: 1059258 - DNA, 33 bp, Homo sapien
gaacctgaaaggatatgaggattaagctgctgt

SEQ ID NO: 1059259 - DNA, 33 bp, Homo sapien
gcaatcccactacccacagaaaaagtcattata

SEQ ID NO: 1059260 - DNA, 33 bp, Homo sapien
gcaatcccactacccagagaaaaagtcattata

SEQ ID NO: 1059261 - DNA, 33 bp, Homo sapien
tactagaaggtgtcagcaataaaatagaacaag

SEQ ID NO: 1059262 - DNA, 33 bp, Homo sapien
tactagaaggtgtcagtaataaaatagaacaag

SEQ ID NO: 1059263 - DNA, 33 bp, Homo sapien
agccaaaccaagcttcaataagaagaaataaca

SEQ ID NO: 1059264 - DNA, 33 bp, Homo sapien
agccaaaccaagcttcgataagaagaaataaca

SEQ ID NO: 1059265 - DNA, 33 bp, Homo sapien
aaaagtggtgaaagtgaacattcctgtcttgtt

SEQ ID NO: 1059266 - DNA, 33 bp, Homo sapien
aaaagtggtgaaagtggacattcctgtcttgtt

SEQ ID NO: 1059267 - DNA, 33 bp, Homo sapien
ccaggatctacttttccaacaaaggagactttc

SEQ ID NO: 1059268 - DNA, 33 bp, Homo sapien
ccaggatctacttttctaacaaaggagactttc

SEQ ID NO: 1059269 - DNA, 33 bp, Homo sapien
tttaatctttgaagtcactcttctttgtatggt

SEQ ID NO: 1059270 - DNA, 33 bp, Homo sapien
tttaatctttgaagtcgctcttctttgtatggt

SEQ ID NO: 1059271 - DNA, 33 bp, Homo sapien
tcattatgatgatcttcaacctcgatgtccttt

SEQ ID NO: 1059272 - DNA, 33 bp, Homo sapien
tcattatgatgatctttaacctcgatgtccttt

SEQ ID NO: 1059273 - DNA, 33 bp, Homo sapien
agggttagtggaaactcactgttctggttgcta

SEQ ID NO: 1059274 - DNA, 33 bp, Homo sapien
agggttagtggaaactgactgttctggttgcta

SEQ ID NO: 1059275 - DNA, 33 bp, Homo sapien
gagacaaccaacaccaaaatgactatgcaatgt

SEQ ID NO: 1059276 - DNA, 33 bp, Homo sapien
gagacaaccaacaccacaatgactatgcaatgt

SEQ ID NO: 1059277 - DNA, 33 bp, Homo sapien
tttgggcaatgctaatcaaggggatttcaagac

SEQ ID NO: 1059278 - DNA, 33 bp, Homo sapien
tttgggcaatgctaatgaaggggatttcaagac

SEQ ID NO: 1059279 - DNA, 33 bp, Homo sapien
ctgtatggataattctcactaggttggattact

SEQ ID NO: 1059280 - DNA, 33 bp, Homo sapien
ctgtatggataattcttactaggttggattact

SEQ ID NO: 1059281 - DNA, 33 bp, Homo sapien
tcacagtttgaaaagacaaagcaaccatcaaga

SEQ ID NO: 1059282 - DNA, 33 bp, Homo sapien
tcacagtttgaaaagagaaagcaaccatcaaga

SEQ ID NO: 1059283 - DNA, 33 bp, Homo sapien
taaaagatgttcttcagagagaaaaaaagaata

SEQ ID NO: 1059284 - DNA, 33 bp, Homo sapien
taaaagatgttcttcatagagaaaaaaagaata

SEQ ID NO: 1059285 - DNA, 33 bp, Homo sapien
tgacaggcaaatcaaacaaatacagagaactcc

SEQ ID NO: 1059286 - DNA, 33 bp, Homo sapien
tgacaggcaaatcaaagaaatacagagaactcc

SEQ ID NO: 1059287 - DNA, 33 bp, Homo sapien
tcaaattatccaaaaaattatggagaagggagg

SEQ ID NO: 1059288 - DNA, 33 bp, Homo sapien
tcaaattatccaaaaatttatggagaagggagg

SEQ ID NO: 1059289 - DNA, 33 bp, Homo sapien
tcatgcaaacagtgaaaattttatcccacaggt

SEQ ID NO: 1059290 - DNA, 33 bp, Homo sapien
tcatgcaaacagtgaacattttatcccacaggt

SEQ ID NO: 1059291 - DNA, 33 bp, Homo sapien
taaaagtgctagacgaacaaccacaaagtgcac

SEQ ID NO: 1059292 - DNA, 33 bp, Homo sapien
taaaagtgctagacgagcaaccacaaagtgcac

SEQ ID NO: 1059293 - DNA, 33 bp, Homo sapien
attaaattatttttcacctgcaactattcctat

SEQ ID NO: 1059294 - DNA, 33 bp, Homo sapien
attaaattatttttcatctgcaactattcctat

SEQ ID NO: 1059295 - DNA, 33 bp, Homo sapien
tgtaagcaaagttgaaaggccgtgttagaggga

SEQ ID NO: 1059296 - DNA, 33 bp, Homo sapien
tgtaagcaaagttgaagggccgtgttagaggga

SEQ ID NO: 1059297 - DNA, 33 bp, Homo sapien
tataaatggtccaagaaatctttgagtacagac

SEQ ID NO: 1059298 - DNA, 33 bp, Homo sapien
tataaatggtccaagagatctttgagtacagac

SEQ ID NO: 1059299 - DNA, 33 bp, Homo sapien
gcttccttgtcatccaacttctgaattctatgt

SEQ ID NO: 1059300 - DNA, 33 bp, Homo sapien
gcttccttgtcatccagcttctgaattctatgt

SEQ ID NO: 1059301 - DNA, 33 bp, Homo sapien
acagatgtggcacaagaagatgggtatttcatc

SEQ ID NO: 1059302 - DNA, 33 bp, Homo sapien
acagatgtggcacaagcagatgggtatttcatc

SEQ ID NO: 1059303 - DNA, 33 bp, Homo sapien
gaagaatttttgaatccgatatctatggtatcc

SEQ ID NO: 1059304 - DNA, 33 bp, Homo sapien
gaagaatttttgaatctgatatctatggtatcc

SEQ ID NO: 1059305 - DNA, 33 bp, Homo sapien
cagtcatggatgccacaccaaggtgcttcccag

SEQ ID NO: 1059306 - DNA, 33 bp, Homo sapien
cagtcatggatgccactccaaggtgcttcccag

SEQ ID NO: 1059307 - DNA, 33 bp, Homo sapien
ctgctgacagataataagagcaggagtgtagcc

SEQ ID NO: 1059308 - DNA, 33 bp, Homo sapien
ctgctgacagataataggagcaggagtgtagcc

SEQ ID NO: 1059309 - DNA, 33 bp, Homo sapien
tcttttctgatcattacggttttaaggtttatt

SEQ ID NO: 1059310 - DNA, 33 bp, Homo sapien
tcttttctgatcattatggttttaaggtttatt

SEQ ID NO: 1059311 - DNA, 33 bp, Homo sapien
cacccaggagattgaaccaacaacccttgtatc

SEQ ID NO: 1059312 - DNA, 33 bp, Homo sapien
cacccaggagattgaatcaacaacccttgtatc

SEQ ID NO: 1059313 - DNA, 33 bp, Homo sapien
acatccttacttgatgaagctcttaaagagaaa

SEQ ID NO: 1059314 - DNA, 33 bp, Homo sapien
acatccttacttgatgcagctcttaaagagaaa

SEQ ID NO: 1059315 - DNA, 33 bp, Homo sapien
atgatatgacagtgtacataaaattccacaaag

SEQ ID NO: 1059316 - DNA, 33 bp, Homo sapien
atgatatgacagtgtatataaaattccacaaag

SEQ ID NO: 1059317 - DNA, 33 bp, Homo sapien
aaaattatcatattacaatgacctgtgatccta

SEQ ID NO: 1059318 - DNA, 33 bp, Homo sapien
aaaattatcatattaccatgacctgtgatccta

SEQ ID NO: 1059319 - DNA, 33 bp, Homo sapien
agcataggtgctagaaaatatgaccagatggaa

SEQ ID NO: 1059320 - DNA, 33 bp, Homo sapien
agcataggtgctagaagatatgaccagatggaa

SEQ ID NO: 1059321 - DNA, 33 bp, Homo sapien
cttactaatgtggcaccaagaaagctattattg

SEQ ID NO: 1059322 - DNA, 33 bp, Homo sapien
cttactaatgtggcactaagaaagctattattg

SEQ ID NO: 1059323 - DNA, 33 bp, Homo sapien
caagaaagatatttcacgcaaatggaaaccaaa

SEQ ID NO: 1059324 - DNA, 33 bp, Homo sapien
caagaaagatatttcatgcaaatggaaaccaaa

SEQ ID NO: 1059325 - DNA, 33 bp, Homo sapien
gataaatctgggtttacatataattgtggaaat

SEQ ID NO: 1059326 - DNA, 33 bp, Homo sapien
gataaatctgggtttagatataattgtggaaat

SEQ ID NO: 1059327 - DNA, 33 bp, Homo sapien
ttttctagtcaggcaaagaaaagaacttcaaaa

SEQ ID NO: 1059328 - DNA, 33 bp, Homo sapien
ttttctagtcaggcaaggaaaagaacttcaaaa

SEQ ID NO: 1059329 - DNA, 33 bp, Homo sapien
ttttctatgtacctacagtaagtttactcccaa

SEQ ID NO: 1059330 - DNA, 33 bp, Homo sapien
ttttctatgtacctaccgtaagtttactcccaa

SEQ ID NO: 1059331 - DNA, 33 bp, Homo sapien
acaaaactgaatgttaactttctcctgactttg

SEQ ID NO: 1059332 - DNA, 33 bp, Homo sapien
acaaaactgaatgttatctttctcctgactttg

SEQ ID NO: 1059333 - DNA, 33 bp, Homo sapien
taaaatgtgtgactgaaaattcaaaaaggagca

SEQ ID NO: 1059334 - DNA, 33 bp, Homo sapien
taaaatgtgtgactgagaattcaaaaaggagca

SEQ ID NO: 1059335 - DNA, 33 bp, Homo sapien
acagcaaaagaaactacagtgaaccagcaacct

SEQ ID NO: 1059336 - DNA, 33 bp, Homo sapien
acagcaaaagaaactagagtgaaccagcaacct

SEQ ID NO: 1059337 - DNA, 33 bp, Homo sapien
cgcattaagcaaaataacttggtactgtacaaa

SEQ ID NO: 1059338 - DNA, 33 bp, Homo sapien
cgcattaagcaaaatagcttggtactgtacaaa

SEQ ID NO: 1059339 - DNA, 33 bp, Homo sapien
catctgctgtagaatgcagtggaataatcatac

SEQ ID NO: 1059340 - DNA, 33 bp, Homo sapien
catctgctgtagaatggagtggaataatcatac

SEQ ID NO: 1059341 - DNA, 33 bp, Homo sapien
accagtgtctgttacaataagctccagtattcc

SEQ ID NO: 1059342 - DNA, 33 bp, Homo sapien
accagtgtctgttacattaagctccagtattcc

SEQ ID NO: 1059343 - DNA, 33 bp, Homo sapien
ttaaatatggcccccaataagcacatttttggc

SEQ ID NO: 1059344 - DNA, 33 bp, Homo sapien
ttaaatatggcccccagtaagcacatttttggc

SEQ ID NO: 1059345 - DNA, 33 bp, Homo sapien
catgaataccaagaagaacaagtgttaactgca

SEQ ID NO: 1059346 - DNA, 33 bp, Homo sapien
catgaataccaagaaggacaagtgttaactgca

SEQ ID NO: 1059347 - DNA, 33 bp, Homo sapien
ataagatcatttaaaggacaaagaaggacaatt

SEQ ID NO: 1059348 - DNA, 33 bp, Homo sapien
ataagatcatttaaagtacaaagaaggacaatt

SEQ ID NO: 1059349 - DNA, 33 bp, Homo sapien
tcatacatcttccatgaaccttttcaaccttag

SEQ ID NO: 1059350 - DNA, 33 bp, Homo sapien
tcatacatcttccatggaccttttcaaccttag

SEQ ID NO: 1059351 - DNA, 33 bp, Homo sapien
agacagactgtgcaacgcatgactcctttcctc

SEQ ID NO: 1059352 - DNA, 33 bp, Homo sapien
agacagactgtgcaactcatgactcctttcctc

SEQ ID NO: 1059353 - DNA, 33 bp, Homo sapien
aacttgaatatggtgacggtattatggatgtgt

SEQ ID NO: 1059354 - DNA, 33 bp, Homo sapien
aacttgaatatggtgatggtattatggatgtgt

SEQ ID NO: 1059355 - DNA, 33 bp, Homo sapien
gacctcatcattcgaaagatagagacacctggc

SEQ ID NO: 1059356 - DNA, 33 bp, Homo sapien
gacctcatcattcgaacgatagagacacctggc

SEQ ID NO: 1059357 - DNA, 33 bp, Homo sapien
cagaatatcctgagaaaaaaaagtggaaacaag

SEQ ID NO: 1059358 - DNA, 33 bp, Homo sapien
cagaatatcctgagaacaaaaagtggaaacaag

SEQ ID NO: 1059359 - DNA, 33 bp, Homo sapien
taaggatagagacacccggtcgaccccaagcat

SEQ ID NO: 1059360 - DNA, 33 bp, Homo sapien
taaggatagagacacctggtcgaccccaagcat

SEQ ID NO: 1059361 - DNA, 33 bp, Homo sapien
agactttggggtaaccacacttggcaagacaca

SEQ ID NO: 1059362 - DNA, 33 bp, Homo sapien
agactttggggtaaccgcacttggcaagacaca

SEQ ID NO: 1059363 - DNA, 33 bp, Homo sapien
aagctctcagtgaaaacgctatgtgatgtgtgg

SEQ ID NO: 1059364 - DNA, 33 bp, Homo sapien
aagctctcagtgaaaatgctatgtgatgtgtgg

SEQ ID NO: 1059365 - DNA, 33 bp, Homo sapien
aagttgcccccttctcacaagtcagagagcctt

SEQ ID NO: 1059366 - DNA, 33 bp, Homo sapien
aagttgcccccttctcgcaagtcagagagcctt

SEQ ID NO: 1059367 - DNA, 33 bp, Homo sapien
atgaacaacaatattcaatgcaaatagttacct

SEQ ID NO: 1059368 - DNA, 33 bp, Homo sapien
atgaacaacaatattccatgcaaatagttacct

SEQ ID NO: 1059369 - DNA, 33 bp, Homo sapien
ctcagagaaaagtttgaaggaactagtccaata

SEQ ID NO: 1059370 - DNA, 33 bp, Homo sapien
ctcagagaaaagtttgcaggaactagtccaata

SEQ ID NO: 1059371 - DNA, 33 bp, Homo sapien
ctgttaattatctgacagaccatcaagaagata

SEQ ID NO: 1059372 - DNA, 33 bp, Homo sapien
ctgttaattatctgacggaccatcaagaagata

SEQ ID NO: 1059373 - DNA, 33 bp, Homo sapien
attaacagatgaaaaaagtcgcataactttgta

SEQ ID NO: 1059374 - DNA, 33 bp, Homo sapien
attaacagatgaaaaaggtcgcataactttgta

SEQ ID NO: 1059375 - DNA, 33 bp, Homo sapien
atatataagttaaccaaagagacaaaatctctg

SEQ ID NO: 1059376 - DNA, 33 bp, Homo sapien
atatataagttaaccagagagacaaaatctctg

SEQ ID NO: 1059377 - DNA, 33 bp, Homo sapien
aaacctttctgagatcaagataaattacattca

SEQ ID NO: 1059378 - DNA, 33 bp, Homo sapien
aaacctttctgagatcgagataaattacattca

SEQ ID NO: 1059379 - DNA, 33 bp, Homo sapien
agagtaaatagtgttacatttttctgggctgga

SEQ ID NO: 1059380 - DNA, 33 bp, Homo sapien
agagtaaatagtgttatatttttctgggctgga

SEQ ID NO: 1059381 - DNA, 33 bp, Homo sapien
tctgtctcaaatgcccgaagcttgctcgtgttt

SEQ ID NO: 1059382 - DNA, 33 bp, Homo sapien
tctgtctcaaatgccctaagcttgctcgtgttt

SEQ ID NO: 1059383 - DNA, 33 bp, Homo sapien
tttctgtcctgatacacaactgtgctatttttc

SEQ ID NO: 1059384 - DNA, 33 bp, Homo sapien
tttctgtcctgatacagaactgtgctatttttc

SEQ ID NO: 1059385 - DNA, 33 bp, Homo sapien
gtataaaaaagtctcaagtctagctttcatccc

SEQ ID NO: 1059386 - DNA, 33 bp, Homo sapien
gtataaaaaagtctcaggtctagctttcatccc

SEQ ID NO: 1059387 - DNA, 33 bp, Homo sapien
agagagcaaacacaaactctcactgatggagtt

SEQ ID NO: 1059388 - DNA, 33 bp, Homo sapien
agagagcaaacacaaagtctcactgatggagtt

SEQ ID NO: 1059389 - DNA, 33 bp, Homo sapien
ttcatgtctctattgaaatgttcaggtctaacc

SEQ ID NO: 1059390 - DNA, 33 bp, Homo sapien
ttcatgtctctattgagatgttcaggtctaacc

SEQ ID NO: 1059391 - DNA, 33 bp, Homo sapien
tccatttcatgaagccagaagaattcaacattt

SEQ ID NO: 1059392 - DNA, 33 bp, Homo sapien
tccatttcatgaagcctgaagaattcaacattt

SEQ ID NO: 1059393 - DNA, 33 bp, Homo sapien
aaaaattaagttgggagcaaggactcaaaaata

SEQ ID NO: 1059394 - DNA, 33 bp, Homo sapien
aaaaattaagttgggatcaaggactcaaaaata

SEQ ID NO: 1059395 - DNA, 33 bp, Homo sapien
tttgttactccatcaacactttttatccactta

SEQ ID NO: 1059396 - DNA, 33 bp, Homo sapien
tttgttactccatcaagactttttatccactta

SEQ ID NO: 1059397 - DNA, 33 bp, Homo sapien
gtttttggtagagtaaaacttctgggcaaatcg

SEQ ID NO: 1059398 - DNA, 33 bp, Homo sapien
gtttttggtagagtaagacttctgggcaaatcg

SEQ ID NO: 1059399 - DNA, 33 bp, Homo sapien
agtggttaccaaaatacgtatttccaaagagac

SEQ ID NO: 1059400 - DNA, 33 bp, Homo sapien
agtggttaccaaaatatgtatttccaaagagac

SEQ ID NO: 1059401 - DNA, 33 bp, Homo sapien
tcaagtttttcctatccctactaattgcaccac

SEQ ID NO: 1059402 - DNA, 33 bp, Homo sapien
tcaagtttttcctatctctactaattgcaccac

SEQ ID NO: 1059403 - DNA, 33 bp, Homo sapien
gattatccaggttcagaagaatggaaaaatgca

SEQ ID NO: 1059404 - DNA, 33 bp, Homo sapien
gattatccaggttcaggagaatggaaaaatgca

SEQ ID NO: 1059405 - DNA, 33 bp, Homo sapien
ctcacaagcttgtaaaagtgacagtttaaacac

SEQ ID NO: 1059406 - DNA, 33 bp, Homo sapien
ctcacaagcttgtaaaggtgacagtttaaacac

SEQ ID NO: 1059407 - DNA, 33 bp, Homo sapien
tacacacaatttggaaatctcactcggatttga

SEQ ID NO: 1059408 - DNA, 33 bp, Homo sapien
tacacacaatttggaattctcactcggatttga

SEQ ID NO: 1059409 - DNA, 33 bp, Homo sapien
ttctctcttttttgccaattagtcttgtaagaa

SEQ ID NO: 1059410 - DNA, 33 bp, Homo sapien
ttctctcttttttgccgattagtcttgtaagaa

SEQ ID NO: 1059411 - DNA, 33 bp, Homo sapien
tggaacaagagctcacaaactgcagaatgtggg

SEQ ID NO: 1059412 - DNA, 33 bp, Homo sapien
tggaacaagagctcacgaactgcagaatgtggg

SEQ ID NO: 1059413 - DNA, 33 bp, Homo sapien
caagaatccttctaagccagtacagagagaata

SEQ ID NO: 1059414 - DNA, 33 bp, Homo sapien
caagaatccttctaagtcagtacagagagaata

SEQ ID NO: 1059415 - DNA, 33 bp, Homo sapien
attagtaactgaccaaactaggatttgaactcg

SEQ ID NO: 1059416 - DNA, 33 bp, Homo sapien
attagtaactgaccaagctaggatttgaactcg

SEQ ID NO: 1059417 - DNA, 33 bp, Homo sapien
gctatccataactttccagtggtttaaaagatt

SEQ ID NO: 1059418 - DNA, 33 bp, Homo sapien
gctatccataactttctagtggtttaaaagatt

SEQ ID NO: 1059419 - DNA, 33 bp, Homo sapien
ttactgagttcttgacaggaggaaaataggact

SEQ ID NO: 1059420 - DNA, 33 bp, Homo sapien
ttactgagttcttgacgggaggaaaataggact

SEQ ID NO: 1059421 - DNA, 33 bp, Homo sapien
aacctaaacctatacaatctggacatccaacaa

SEQ ID NO: 1059422 - DNA, 33 bp, Homo sapien
aacctaaacctatacattctggacatccaacaa

SEQ ID NO: 1059423 - DNA, 33 bp, Homo sapien
catctgttttgcattacactgaacatttactcc

SEQ ID NO: 1059424 - DNA, 33 bp, Homo sapien
catctgttttgcattagactgaacatttactcc

SEQ ID NO: 1059425 - DNA, 33 bp, Homo sapien
attgtacaaagactaaatccagctaattaacat

SEQ ID NO: 1059426 - DNA, 33 bp, Homo sapien
attgtacaaagactaagtccagctaattaacat

SEQ ID NO: 1059427 - DNA, 33 bp, Homo sapien
ggtttctgtctgaataactgggcaatccttaga

SEQ ID NO: 1059428 - DNA, 33 bp, Homo sapien
ggtttctgtctgaatagctgggcaatccttaga

SEQ ID NO: 1059429 - DNA, 33 bp, Homo sapien
ctcttactttcaaagaacagaggaacattttat

SEQ ID NO: 1059430 - DNA, 33 bp, Homo sapien
ctcttactttcaaagagcagaggaacattttat

SEQ ID NO: 1059431 - DNA, 33 bp, Homo sapien
gagttcagatccaagacagcaagggatgaatgg

SEQ ID NO: 1059432 - DNA, 33 bp, Homo sapien
gagttcagatccaagagagcaagggatgaatgg

SEQ ID NO: 1059433 - DNA, 33 bp, Homo sapien
tcaataaactgcccaaatgttccagagtgtatc

SEQ ID NO: 1059434 - DNA, 33 bp, Homo sapien
tcaataaactgcccaactgttccagagtgtatc

SEQ ID NO: 1059435 - DNA, 33 bp, Homo sapien
gaaaaaaatccatgtaaaagtgaatctatgcag

SEQ ID NO: 1059436 - DNA, 33 bp, Homo sapien
gaaaaaaatccatgtacaagtgaatctatgcag

SEQ ID NO: 1059437 - DNA, 33 bp, Homo sapien
cccagacagttagaaaatagtttgcatgtgagg

SEQ ID NO: 1059438 - DNA, 33 bp, Homo sapien
cccagacagttagaaagtagtttgcatgtgagg

SEQ ID NO: 1059439 - DNA, 33 bp, Homo sapien
aaatttttttcgtggccaatcttgcctatttga

SEQ ID NO: 1059440 - DNA, 33 bp, Homo sapien
aaatttttttcgtggctaatcttgcctatttga

SEQ ID NO: 1059441 - DNA, 33 bp, Homo sapien
agagcagggccatgcaaggaataagaggactgt

SEQ ID NO: 1059442 - DNA, 33 bp, Homo sapien
agagcagggccatgcagggaataagaggactgt

SEQ ID NO: 1059443 - DNA, 33 bp, Homo sapien
attaaaaggagtgataacatgtgccttgcaaca

SEQ ID NO: 1059444 - DNA, 33 bp, Homo sapien
attaaaaggagtgatatcatgtgccttgcaaca

SEQ ID NO: 1059445 - DNA, 33 bp, Homo sapien
ttgctaaacttctctcacctcaatttctctctc

SEQ ID NO: 1059446 - DNA, 33 bp, Homo sapien
ttgctaaacttctctcgcctcaatttctctctc

SEQ ID NO: 1059447 - DNA, 33 bp, Homo sapien
ccactggtctccttcccgaagttaactctcagt

SEQ ID NO: 1059448 - DNA, 33 bp, Homo sapien
ccactggtctccttcctgaagttaactctcagt

SEQ ID NO: 1059449 - DNA, 33 bp, Homo sapien
atagttgttagcaaacaattccaacaggggtat

SEQ ID NO: 1059450 - DNA, 33 bp, Homo sapien
atagttgttagcaaaccattccaacaggggtat

SEQ ID NO: 1059451 - DNA, 33 bp, Homo sapien
gccattaaactgtgtcaagtcaagtattaaaat

SEQ ID NO: 1059452 - DNA, 33 bp, Homo sapien
gccattaaactgtgtcgagtcaagtattaaaat

SEQ ID NO: 1059453 - DNA, 33 bp, Homo sapien
aaattcaagacaaagaaaactggatttatatct

SEQ ID NO: 1059454 - DNA, 33 bp, Homo sapien
aaattcaagacaaagagaactggatttatatct

SEQ ID NO: 1059455 - DNA, 33 bp, Homo sapien
gagaagatcattgggaaggcagtgcatcagctg

SEQ ID NO: 1059456 - DNA, 33 bp, Homo sapien
gagaagatcattgggagggcagtgcatcagctg

SEQ ID NO: 1059457 - DNA, 33 bp, Homo sapien
agcacgggtatgtctaagagtgtggccgcgcct

SEQ ID NO: 1059458 - DNA, 33 bp, Homo sapien
agcacgggtatgtctaggagtgtggccgcgcct

SEQ ID NO: 1059459 - DNA, 33 bp, Homo sapien
tgaatgaaaagaagaaaggctgtctgtgtttgg

SEQ ID NO: 1059460 - DNA, 33 bp, Homo sapien
tgaatgaaaagaagaagggctgtctgtgtttgg

SEQ ID NO: 1059461 - DNA, 33 bp, Homo sapien
ccatgccttgacaaaactgccttgtcatgctgc

SEQ ID NO: 1059462 - DNA, 33 bp, Homo sapien
ccatgccttgacaaaattgccttgtcatgctgc

SEQ ID NO: 1059463 - DNA, 33 bp, Homo sapien
taggtgataggttaagcaccaccatttataaat

SEQ ID NO: 1059464 - DNA, 33 bp, Homo sapien
taggtgataggttaagtaccaccatttataaat

SEQ ID NO: 1059465 - DNA, 33 bp, Homo sapien
agagtttgtgtagtgacgcaagacagcctgaca

SEQ ID NO: 1059466 - DNA, 33 bp, Homo sapien
agagtttgtgtagtgatgcaagacagcctgaca

SEQ ID NO: 1059467 - DNA, 33 bp, Homo sapien
tctctcctagggttgccgaagaacccaacgctc

SEQ ID NO: 1059468 - DNA, 33 bp, Homo sapien
tctctcctagggttgctgaagaacccaacgctc

SEQ ID NO: 1059469 - DNA, 33 bp, Homo sapien
tagtcaattcaagtaaaggccattctgttttgt

SEQ ID NO: 1059470 - DNA, 33 bp, Homo sapien
tagtcaattcaagtaagggccattctgttttgt

SEQ ID NO: 1059471 - DNA, 33 bp, Homo sapien
aggtcaagttagaccaaacggctcttgcaaact

SEQ ID NO: 1059472 - DNA, 33 bp, Homo sapien
aggtcaagttagaccacacggctcttgcaaact

SEQ ID NO: 1059473 - DNA, 33 bp, Homo sapien
atacttgagtgtaaaacagaggtcataatcttt

SEQ ID NO: 1059474 - DNA, 33 bp, Homo sapien
atacttgagtgtaaaagagaggtcataatcttt

SEQ ID NO: 1059475 - DNA, 33 bp, Homo sapien
cagaattggagttgtgaacttaacatgtgtgga

SEQ ID NO: 1059476 - DNA, 33 bp, Homo sapien
cagaattggagttgtggacttaacatgtgtgga

SEQ ID NO: 1059477 - DNA, 33 bp, Homo sapien
ctgtccagatcctgctaaatcaattgccaatag

SEQ ID NO: 1059478 - DNA, 33 bp, Homo sapien
ctgtccagatcctgctgaatcaattgccaatag

SEQ ID NO: 1059479 - DNA, 33 bp, Homo sapien
aagagaaatgatcctgaatatagctggtcctct

SEQ ID NO: 1059480 - DNA, 33 bp, Homo sapien
aagagaaatgatcctggatatagctggtcctct

SEQ ID NO: 1059481 - DNA, 33 bp, Homo sapien
tctctcaactttttgaaagaagagagacatctc

SEQ ID NO: 1059482 - DNA, 33 bp, Homo sapien
tctctcaactttttgatagaagagagacatctc

SEQ ID NO: 1059483 - DNA, 33 bp, Homo sapien
aaaggtttctgagaaacgccactcaactttctt

SEQ ID NO: 1059484 - DNA, 33 bp, Homo sapien
aaaggtttctgagaaatgccactcaactttctt

SEQ ID NO: 1059485 - DNA, 33 bp, Homo sapien
tcactctgccacataaacaaaacctagtcactc

SEQ ID NO: 1059486 - DNA, 33 bp, Homo sapien
tcactctgccacataaccaaaacctagtcactc

SEQ ID NO: 1059487 - DNA, 33 bp, Homo sapien
tgcaggagtcccatcacctctgtttccacatgg

SEQ ID NO: 1059488 - DNA, 33 bp, Homo sapien
tgcaggagtcccatcatctctgtttccacatgg

SEQ ID NO: 1059489 - DNA, 33 bp, Homo sapien
gcaactaagcccattaaagtcttagcaggtgcc

SEQ ID NO: 1059490 - DNA, 33 bp, Homo sapien
gcaactaagcccattatagtcttagcaggtgcc

SEQ ID NO: 1059491 - DNA, 33 bp, Homo sapien
ttacaaggagtcaccaaagtgccagagttgcag

SEQ ID NO: 1059492 - DNA, 33 bp, Homo sapien
ttacaaggagtcaccagagtgccagagttgcag

SEQ ID NO: 1059493 - DNA, 33 bp, Homo sapien
gtttgagactctgaggaaaatcttaatctcgtg

SEQ ID NO: 1059494 - DNA, 33 bp, Homo sapien
gtttgagactctgagggaaatcttaatctcgtg

SEQ ID NO: 1059495 - DNA, 33 bp, Homo sapien; identical to SEQ ID NO: 1059493

SEQ ID NO: 1059496 - DNA, 33 bp, Homo sapien; identical to SEQ ID NO: 1059494

SEQ ID NO: 1059497 - DNA, 33 bp, Homo sapien
tgtttagacacttatccatgtcacagtctaaaa

SEQ ID NO: 1059498 - DNA, 33 bp, Homo sapien
tgtttagacacttatcgatgtcacagtctaaaa

SEQ ID NO: 1059499 - DNA, 33 bp, Homo sapien
ctggagctccatgaccaatcatcctgtctgtct

SEQ ID NO: 1059500 - DNA, 33 bp, Homo sapien
ctggagctccatgaccgatcatcctgtctgtct

SEQ ID NO: 1059501 - DNA, 33 bp, Homo sapien; identical to SEQ ID NO: 1059499

SEQ ID NO: 1059502 - DNA, 33 bp, Homo sapien; identical to SEQ ID NO: 1059500

SEQ ID NO: 1059503 - DNA, 33 bp, Homo sapien
gctgctaaagccaacagcataaacgccatctac

SEQ ID NO: 1059504 - DNA, 33 bp, Homo sapien
gctgctaaagccaacatcataaacgccatctac

SEQ ID NO: 1059505 - DNA, 33 bp, Homo sapien
ctctatggaagatccacggcgctttagcaaggt

SEQ ID NO: 1059506 - DNA, 33 bp, Homo sapien
ctctatggaagatccatggcgctttagcaaggt

SEQ ID NO: 1059507 - DNA, 33 bp, Homo sapien
acacactaatagtggaagacttcaaaaatccac

SEQ ID NO: 1059508 - DNA, 33 bp, Homo sapien
acacactaatagtggaggacttcaaaaatccac

SEQ ID NO: 1059509 - DNA, 33 bp, Homo sapien
ttcagactattctaaaagtgattcttaatgcaa

SEQ ID NO: 1059510 - DNA, 33 bp, Homo sapien
ttcagactattctaaacgtgattcttaatgcaa

SEQ ID NO: 1059511 - DNA, 33 bp, Homo sapien
agctacattgactttccctgcagaattaggaaa

SEQ ID NO: 1059512 - DNA, 33 bp, Homo sapien
agctacattgactttctctgcagaattaggaaa

SEQ ID NO: 1059513 - DNA, 33 bp, Homo sapien
cctcagttggaaaggcagaaatcacccaccttc

SEQ ID NO: 1059514 - DNA, 33 bp, Homo sapien
cctcagttggaaaggctgaaatcacccaccttc

SEQ ID NO: 1059515 - DNA, 33 bp, Homo sapien
atgcataagtgtctgaacacaacttacagactc

SEQ ID NO: 1059516 - DNA, 33 bp, Homo sapien
atgcataagtgtctgatcacaacttacagactc

SEQ ID NO: 1059517 - DNA, 33 bp, Homo sapien
ttggctaggagcagacacttttctccaggcagg

SEQ ID NO: 1059518 - DNA, 33 bp, Homo sapien
ttggctaggagcagacgcttttctccaggcagg

SEQ ID NO: 1059519 - DNA, 33 bp, Homo sapien
acaaatcaccgctaaacaacttattcatgtaac

SEQ ID NO: 1059520 - DNA, 33 bp, Homo sapien
acaaatcaccgctaaagaacttattcatgtaac

SEQ ID NO: 1059521 - DNA, 33 bp, Homo sapien
atccaccaaatactagacccagtggataccctc

SEQ ID NO: 1059522 - DNA, 33 bp, Homo sapien
atccaccaaatactaggcccagtggataccctc

SEQ ID NO: 1059523 - DNA, 33 bp, Homo sapien
aatttaaatggttgataagccattcagccagga

SEQ ID NO: 1059524 - DNA, 33 bp, Homo sapien
aatttaaatggttgattagccattcagccagga

SEQ ID NO: 1059525 - DNA, 33 bp, Homo sapien
catccacatatggcaaataattctgcctacttc

SEQ ID NO: 1059526 - DNA, 33 bp, Homo sapien
catccacatatggcaactaattctgcctacttc

SEQ ID NO: 1059527 - DNA, 33 bp, Homo sapien
atctcaaggatttgtcaaaatttatttactttt

SEQ ID NO: 1059528 - DNA, 33 bp, Homo sapien
atctcaaggatttgtcgaaatttatttactttt

SEQ ID NO: 1059529 - DNA, 33 bp, Homo sapien
tctcagtagttgctgaaaattcaattgtggctt

SEQ ID NO: 1059530 - DNA, 33 bp, Homo sapien
tctcagtagttgctgataattcaattgtggctt

SEQ ID NO: 1059531 - DNA, 33 bp, Homo sapien
tggattcctctagttacggttacattttcctga

SEQ ID NO: 1059532 - DNA, 33 bp, Homo sapien
tggattcctctagttatggttacattttcctga

SEQ ID NO: 1059533 - DNA, 33 bp, Homo sapien
tgcccctagcatttatcacaacttaccatcctc

SEQ ID NO: 1059534 - DNA, 33 bp, Homo sapien
tgcccctagcatttattacaacttaccatcctc

SEQ ID NO: 1059535 - DNA, 33 bp, Homo sapien
tatatatgagcttagagacctgaaataggaata

SEQ ID NO: 1059536 - DNA, 33 bp, Homo sapien
tatatatgagcttagatacctgaaataggaata

SEQ ID NO: 1059537 - DNA, 33 bp, Homo sapien
gaacctccttaaagcacaaacctcacaggacct

SEQ ID NO: 1059538 - DNA, 33 bp, Homo sapien
gaacctccttaaagcataaacctcacaggacct

SEQ ID NO: 1059539 - DNA, 33 bp, Homo sapien
gtcttgtgccaaagtaccaggaccatagtattg

SEQ ID NO: 1059540 - DNA, 33 bp, Homo sapien
gtcttgtgccaaagtatcaggaccatagtattg

SEQ ID NO: 1059541 - DNA, 33 bp, Homo sapien
ctcacacctgtcagagcagctgttattaaatag

SEQ ID NO: 1059542 - DNA, 33 bp, Homo sapien
ctcacacctgtcagagtagctgttattaaatag

SEQ ID NO: 1059543 - DNA, 33 bp, Homo sapien
gcaatttgtagaaatgaaaattgttgggaatct

SEQ ID NO: 1059544 - DNA, 33 bp, Homo sapien
gcaatttgtagaaatgcaaattgttgggaatct

SEQ ID NO: 1059545 - DNA, 33 bp, Homo sapien
tttcctctatgttttccaagcgcctgtaccttg

SEQ ID NO: 1059546 - DNA, 33 bp, Homo sapien
tttcctctatgttttcgaagcgcctgtaccttg

SEQ ID NO: 1059547 - DNA, 33 bp, Homo sapien
actgaaatagttcttcccatgaaatcatctgat

SEQ ID NO: 1059548 - DNA, 33 bp, Homo sapien
actgaaatagttcttctcatgaaatcatctgat

SEQ ID NO: 1059549 - DNA, 33 bp, Homo sapien
ctgaaggggcatacaacatactgaggcaccagc

SEQ ID NO: 1059550 - DNA, 33 bp, Homo sapien
ctgaaggggcatacaatatactgaggcaccagc

SEQ ID NO: 1059551 - DNA, 33 bp, Homo sapien
gttatcagtatgaatacgaataataaagcatgg

SEQ ID NO: 1059552 - DNA, 33 bp, Homo sapien
gttatcagtatgaatatgaataataaagcatgg

SEQ ID NO: 1059553 - DNA, 33 bp, Homo sapien
ttttggatacgtacccagagagtttaggcaaca

SEQ ID NO: 1059554 - DNA, 33 bp, Homo sapien
ttttggatacgtacccggagagtttaggcaaca

SEQ ID NO: 1059555 - DNA, 33 bp, Homo sapien
gggtattaacaaagaaatacgaatctgaaaccc

SEQ ID NO: 1059556 - DNA, 33 bp, Homo sapien
gggtattaacaaagaagtacgaatctgaaaccc

SEQ ID NO: 1059557 - DNA, 33 bp, Homo sapien
gttttctggtccagaacgaatagaaaaaattcg

SEQ ID NO: 1059558 - DNA, 33 bp, Homo sapien
gttttctggtccagaatgaatagaaaaaattcg

SEQ ID NO: 1059559 - DNA, 33 bp, Homo sapien
tgtaatgatcaagtaaggatatctggggtacca

SEQ ID NO: 1059560 - DNA, 33 bp, Homo sapien
tgtaatgatcaagtaatgatatctggggtacca

SEQ ID NO: 1059561 - DNA, 33 bp, Homo sapien
aataaaaattgtgacccatacaaaacaaaaaat

SEQ ID NO: 1059562 - DNA, 33 bp, Homo sapien
aataaaaattgtgacctatacaaaacaaaaaat

SEQ ID NO: 1059563 - DNA, 33 bp, Homo sapien
aatattctaacttagaacatttcacacattact

SEQ ID NO: 1059564 - DNA, 33 bp, Homo sapien
aatattctaacttagatcatttcacacattact

SEQ ID NO: 1059565 - DNA, 33 bp, Homo sapien
ttctaagtaggctgaaaactgatagaccaatac

SEQ ID NO: 1059566 - DNA, 33 bp, Homo sapien
ttctaagtaggctgaagactgatagaccaatac

SEQ ID NO: 1059567 - DNA, 33 bp, Homo sapien
gtagcttggctcaaaaactcttgaggggtctta

SEQ ID NO: 1059568 - DNA, 33 bp, Homo sapien
gtagcttggctcaaaatctcttgaggggtctta

SEQ ID NO: 1059569 - DNA, 33 bp, Homo sapien
gctttcactcagaaagcaaagtttgtacctggt

SEQ ID NO: 1059570 - DNA, 33 bp, Homo sapien
gctttcactcagaaaggaaagtttgtacctggt

SEQ ID NO: 1059571 - DNA, 33 bp, Homo sapien
tccgggtcacactgggaaaacttaaaaacatga

SEQ ID NO: 1059572 - DNA, 33 bp, Homo sapien
tccgggtcacactgggtaaacttaaaaacatga

SEQ ID NO: 1059573 - DNA, 33 bp, Homo sapien
aagcttgggcaatggaataccacttttctgcaa

SEQ ID NO: 1059574 - DNA, 33 bp, Homo sapien
aagcttgggcaatggagtaccacttttctgcaa

SEQ ID NO: 1059575 - DNA, 33 bp, Homo sapien
caatgccaggctcttcacttctcatttctagtc

SEQ ID NO: 1059576 - DNA, 33 bp, Homo sapien
caatgccaggctcttcgcttctcatttctagtc

SEQ ID NO: 1059577 - DNA, 33 bp, Homo sapien
ccgaagttatgggacccgatgtgttggccaggt

SEQ ID NO: 1059578 - DNA, 33 bp, Homo sapien
ccgaagttatgggacctgatgtgttggccaggt

SEQ ID NO: 1059579 - DNA, 33 bp, Homo sapien
tccaatgttgcacctcgatgaggcagattgaag

SEQ ID NO: 1059580 - DNA, 33 bp, Homo sapien
tccaatgttgcacctctatgaggcagattgaag

SEQ ID NO: 1059581 - DNA, 33 bp, Homo sapien
tctcttcctatatgaactggttaactatactga

SEQ ID NO: 1059582 - DNA, 33 bp, Homo sapien
tctcttcctatatgaattggttaactatactga

SEQ ID NO: 1059583 - DNA, 33 bp, Homo sapien
ggtacctgaagtggtgcatgattaaaaaataaa

SEQ ID NO: 1059584 - DNA, 33 bp, Homo sapien
ggtacctgaagtggtgtatgattaaaaaataaa

SEQ ID NO: 1059585 - DNA, 33 bp, Homo sapien
cgtgcaactttcatggaacttcttccccagtgc

SEQ ID NO: 1059586 - DNA, 33 bp, Homo sapien
cgtgcaactttcatgggacttcttccccagtgc

SEQ ID NO: 1059587 - DNA, 33 bp, Homo sapien
aactaaatcagaaaaccgagcactggggaagaa

SEQ ID NO: 1059588 - DNA, 33 bp, Homo sapien
aactaaatcagaaaactgagcactggggaagaa

SEQ ID NO: 1059589 - DNA, 33 bp, Homo sapien
caacaaatccttaccaagttcttgtgccaaatg

SEQ ID NO: 1059590 - DNA, 33 bp, Homo sapien
caacaaatccttaccatgttcttgtgccaaatg

SEQ ID NO: 1059591 - DNA, 33 bp, Homo sapien
tattctacagttttcaaaagtgtctcaaagcgc

SEQ ID NO: 1059592 - DNA, 33 bp, Homo sapien
tattctacagttttcataagtgtctcaaagcgc

SEQ ID NO: 1059593 - DNA, 33 bp, Homo sapien
tttaaagtagaggaaacaatctaaaggcttagg

SEQ ID NO: 1059594 - DNA, 33 bp, Homo sapien
tttaaagtagaggaaagaatctaaaggcttagg

SEQ ID NO: 1059595 - DNA, 33 bp, Homo sapien
ctgtggacctgcttgccatgccagagaaggaca

SEQ ID NO: 1059596 - DNA, 33 bp, Homo sapien
ctgtggacctgcttgctatgccagagaaggaca

SEQ ID NO: 1059597 - DNA, 33 bp, Homo sapien
ctttggtctgaaaaaaatgatggtcagccatcc

SEQ ID NO: 1059598 - DNA, 33 bp, Homo sapien
ctttggtctgaaaaaattgatggtcagccatcc

SEQ ID NO: 1059599 - DNA, 33 bp, Homo sapien
ggtatcagtgatcaaagactttctttcctacct

SEQ ID NO: 1059600 - DNA, 33 bp, Homo sapien
ggtatcagtgatcaaatactttctttcctacct

SEQ ID NO: 1059601 - DNA, 33 bp, Homo sapien
gtgagtttggttttaaaatggcttgagattgtc

SEQ ID NO: 1059602 - DNA, 33 bp, Homo sapien
gtgagtttggttttaatatggcttgagattgtc

SEQ ID NO: 1059603 - DNA, 33 bp, Homo sapien
ccaaaagagcataaacaatctaaggtcacaccc

SEQ ID NO: 1059604 - DNA, 33 bp, Homo sapien
ccaaaagagcataaaccatctaaggtcacaccc

SEQ ID NO: 1059605 - DNA, 33 bp, Homo sapien
aacttcctttgttaggcatatccccaagtatgt

SEQ ID NO: 1059606 - DNA, 33 bp, Homo sapien
aacttcctttgttaggtatatccccaagtatgt

SEQ ID NO: 1059607 - DNA, 33 bp, Homo sapien
tccctaagcctgaggaactaaaatgaaaaggtt

SEQ ID NO: 1059608 - DNA, 33 bp, Homo sapien
tccctaagcctgaggatctaaaatgaaaaggtt

SEQ ID NO: 1059609 - DNA, 33 bp, Homo sapien
ggctggccgatcactccgaataatggtgccata

SEQ ID NO: 1059610 - DNA, 33 bp, Homo sapien
ggctggccgatcactctgaataatggtgccata

SEQ ID NO: 1059611 - DNA, 33 bp, Homo sapien
aatctcctttcttggacagaattagattagtct

SEQ ID NO: 1059612 - DNA, 33 bp, Homo sapien
aatctcctttcttggatagaattagattagtct

SEQ ID NO: 1059613 - DNA, 33 bp, Homo sapien
agcatactaagcaatacggatcttgtttaggac

SEQ ID NO: 1059614 - DNA, 33 bp, Homo sapien
agcatactaagcaatatggatcttgtttaggac

SEQ ID NO: 1059615 - DNA, 33 bp, Homo sapien
aaggtgtggcatccacaattgagcactgttttc

SEQ ID NO: 1059616 - DNA, 33 bp, Homo sapien
aaggtgtggcatccaccattgagcactgttttc

SEQ ID NO: 1059617 - DNA, 33 bp, Homo sapien
aagatcattacctgacactacaaaaacacaatt

SEQ ID NO: 1059618 - DNA, 33 bp, Homo sapien
aagatcattacctgacgctacaaaaacacaatt

SEQ ID NO: 1059619 - DNA, 33 bp, Homo sapien
tgtggacttgcatgaacaagttgttatcacatt

SEQ ID NO: 1059620 - DNA, 33 bp, Homo sapien
tgtggacttgcatgaataagttgttatcacatt

SEQ ID NO: 1059621 - DNA, 33 bp, Homo sapien
atcaaaattggcttacaaggaacatacctcaag

SEQ ID NO: 1059622 - DNA, 33 bp, Homo sapien
atcaaaattggcttacgaggaacatacctcaag

SEQ ID NO: 1059623 - DNA, 33 bp, Homo sapien
acaatattgaacttctcacacataatacattgt

SEQ ID NO: 1059624 - DNA, 33 bp, Homo sapien
acaatattgaacttctgacacataatacattgt

SEQ ID NO: 1059625 - DNA, 33 bp, Homo sapien
aattctaccagcaatacatgaggcttctcattt

SEQ ID NO: 1059626 - DNA, 33 bp, Homo sapien
aattctaccagcaatatatgaggcttctcattt

SEQ ID NO: 1059627 - DNA, 33 bp, Homo sapien
agaataaagattccacagatataatggaattct

SEQ ID NO: 1059628 - DNA, 33 bp, Homo sapien
agaataaagattccacggatataatggaattct

SEQ ID NO: 1059629 - DNA, 33 bp, Homo sapien
agtagcaaacacaatacgtaccatggcctcata

SEQ ID NO: 1059630 - DNA, 33 bp, Homo sapien
agtagcaaacacaatatgtaccatggcctcata

SEQ ID NO: 1059631 - DNA, 33 bp, Homo sapien
ctcagtttgggttcacaaagtgactcctgttta

SEQ ID NO: 1059632 - DNA, 33 bp, Homo sapien
ctcagtttgggttcacgaagtgactcctgttta

SEQ ID NO: 1059633 - DNA, 33 bp, Homo sapien
aaaatagagattttaactccaaactgtgacaaa

SEQ ID NO: 1059634 - DNA, 33 bp, Homo sapien
aaaatagagattttaagtccaaactgtgacaaa

SEQ ID NO: 1059635 - DNA, 33 bp, Homo sapien
aagtcaatgaagcataccctaagaaaggctgtg

SEQ ID NO: 1059636 - DNA, 33 bp, Homo sapien
aagtcaatgaagcatatcctaagaaaggctgtg

SEQ ID NO: 1059637 - DNA, 33 bp, Homo sapien
ttgaaacatgagcccaagatcttccagtccact

SEQ ID NO: 1059638 - DNA, 33 bp, Homo sapien
ttgaaacatgagcccatgatcttccagtccact

SEQ ID NO: 1059639 - DNA, 33 bp, Homo sapien
agatttgcaggtcatgaaaaatttaacctttta

SEQ ID NO: 1059640 - DNA, 33 bp, Homo sapien
agatttgcaggtcatggaaaatttaacctttta

SEQ ID NO: 1059641 - DNA, 33 bp, Homo sapien
tggccagttcttttagaaagttctgcttagtta

SEQ ID NO: 1059642 - DNA, 33 bp, Homo sapien
tggccagttcttttagcaagttctgcttagtta

SEQ ID NO: 1059643 - DNA, 33 bp, Homo sapien
tatccaatgctacagaactgttttacaacaaag

SEQ ID NO: 1059644 - DNA, 33 bp, Homo sapien
tatccaatgctacagagctgttttacaacaaag

SEQ ID NO: 1059645 - DNA, 33 bp, Homo sapien
gacttctaaggttttcgactctagtccctgagt

SEQ ID NO: 1059646 - DNA, 33 bp, Homo sapien
gacttctaaggttttctactctagtccctgagt

SEQ ID NO: 1059647 - DNA, 33 bp, Homo sapien
ggactcagagcgtgtaacttggaatcaccattg

SEQ ID NO: 1059648 - DNA, 33 bp, Homo sapien
ggactcagagcgtgtagcttggaatcaccattg

SEQ ID NO: 1059649 - DNA, 33 bp, Homo sapien
tactcattcacctctaccagttccctgtgaagc

SEQ ID NO: 1059650 - DNA, 33 bp, Homo sapien
tactcattcacctctatcagttccctgtgaagc

SEQ ID NO: 1059651 - DNA, 33 bp, Homo sapien
aggggaatcatttgaaaccgggatgcagaagtt

SEQ ID NO: 1059652 - DNA, 33 bp, Homo sapien
aggggaatcatttgaacccgggatgcagaagtt

SEQ ID NO: 1059653 - DNA, 33 bp, Homo sapien
agacatcagattgcccaaaggctataacagcag

SEQ ID NO: 1059654 - DNA, 33 bp, Homo sapien
agacatcagattgcccgaaggctataacagcag

SEQ ID NO: 1059655 - DNA, 33 bp, Homo sapien
tgctggtgtgaccacaaagcagtctaattgtct

SEQ ID NO: 1059656 - DNA, 33 bp, Homo sapien
tgctggtgtgaccacagagcagtctaattgtct

SEQ ID NO: 1059657 - DNA, 33 bp, Homo sapien
gaatgaacattactgacctaaaggagtgcattg

SEQ ID NO: 1059658 - DNA, 33 bp, Homo sapien
gaatgaacattactgagctaaaggagtgcattg

SEQ ID NO: 1059659 - DNA, 33 bp, Homo sapien
accacagcctaagccactgaggaactcacagac

SEQ ID NO: 1059660 - DNA, 33 bp, Homo sapien
accacagcctaagccattgaggaactcacagac

SEQ ID NO: 1059661 - DNA, 33 bp, Homo sapien
agacaattcagggacacattcacatgccttatt

SEQ ID NO: 1059662 - DNA, 33 bp, Homo sapien
agacaattcagggacatattcacatgccttatt

SEQ ID NO: 1059663 - DNA, 33 bp, Homo sapien
caataaagtgagacccggcctctaaataaatga

SEQ ID NO: 1059664 - DNA, 33 bp, Homo sapien
caataaagtgagaccctgcctctaaataaatga

SEQ ID NO: 1059665 - DNA, 33 bp, Homo sapien
tcaggaatgttaaggccctttgagtgaaataat

SEQ ID NO: 1059666 - DNA, 33 bp, Homo sapien
tcaggaatgttaaggctctttgagtgaaataat

SEQ ID NO: 1059667 - DNA, 33 bp, Homo sapien
tcttctggataaataccctgaagcaagattgct

SEQ ID NO: 1059668 - DNA, 33 bp, Homo sapien
tcttctggataaatacgctgaagcaagattgct

SEQ ID NO: 1059669 - DNA, 33 bp, Homo sapien
tttcaaagaccaaagaatcctgcgagaaaaaag

SEQ ID NO: 1059670 - DNA, 33 bp, Homo sapien
tttcaaagaccaaagactcctgcgagaaaaaag

SEQ ID NO: 1059671 - DNA, 33 bp, Homo sapien
agggaaggtaactccactgagaaattggtcaga

SEQ ID NO: 1059672 - DNA, 33 bp, Homo sapien
agggaaggtaactccattgagaaattggtcaga

SEQ ID NO: 1059673 - DNA, 33 bp, Homo sapien
ccacattttcataaggcaactgtgctgtgctga

SEQ ID NO: 1059674 - DNA, 33 bp, Homo sapien
ccacattttcataaggtaactgtgctgtgctga

SEQ ID NO: 1059675 - DNA, 33 bp, Homo sapien
cccacaacacaagaccaagatctgaatcacagc

SEQ ID NO: 1059676 - DNA, 33 bp, Homo sapien
cccacaacacaagaccgagatctgaatcacagc

SEQ ID NO: 1059677 - DNA, 33 bp, Homo sapien
ggaaacaagacaaataaagatgtgttctaggca

SEQ ID NO: 1059678 - DNA, 33 bp, Homo sapien
ggaaacaagacaaatagagatgtgttctaggca

SEQ ID NO: 1059679 - DNA, 33 bp, Homo sapien
aaccactcctggatcaaaaatgagaggagctag

SEQ ID NO: 1059680 - DNA, 33 bp, Homo sapien
aaccactcctggatcacaaatgagaggagctag

SEQ ID NO: 1059681 - DNA, 33 bp, Homo sapien
gttccaagagcaggaaagaaagagctgagtgct

SEQ ID NO: 1059682 - DNA, 33 bp, Homo sapien
gttccaagagcaggaaggaaagagctgagtgct

SEQ ID NO: 1059683 - DNA, 33 bp, Homo sapien
aggataacaaatagaaacccacaaattattcgt

SEQ ID NO: 1059684 - DNA, 33 bp, Homo sapien
aggataacaaatagaagcccacaaattattcgt

SEQ ID NO: 1059685 - DNA, 33 bp, Homo sapien
agtagtgaactcactacgccatgaatctattta

SEQ ID NO: 1059686 - DNA, 33 bp, Homo sapien
agtagtgaactcactatgccatgaatctattta

SEQ ID NO: 1059687 - DNA, 33 bp, Homo sapien
cataagtcacagtgggaacagaacatctggatg

SEQ ID NO: 1059688 - DNA, 33 bp, Homo sapien
cataagtcacagtggggacagaacatctggatg

SEQ ID NO: 1059689 - DNA, 33 bp, Homo sapien
taggttggccaatacaccctttctttaggcaat

SEQ ID NO: 1059690 - DNA, 33 bp, Homo sapien
taggttggccaatacatcctttctttaggcaat

SEQ ID NO: 1059691 - DNA, 33 bp, Homo sapien
ttccagacagagcaaacaaaaaggcagaaaagc

SEQ ID NO: 1059692 - DNA, 33 bp, Homo sapien
ttccagacagagcaaagaaaaaggcagaaaagc

SEQ ID NO: 1059693 - DNA, 33 bp, Homo sapien
tgggctcaacatatgacaattttatggtattcc

SEQ ID NO: 1059694 - DNA, 33 bp, Homo sapien
tgggctcaacatatgataattttatggtattcc

SEQ ID NO: 1059695 - DNA, 33 bp, Homo sapien
caaagcagaccagaaacatgactaggattggtt

SEQ ID NO: 1059696 - DNA, 33 bp, Homo sapien
caaagcagaccagaaatatgactaggattggtt

SEQ ID NO: 1059697 - DNA, 33 bp, Homo sapien
cttgcacttgggcttgaagaacgaagtcaacag

SEQ ID NO: 1059698 - DNA, 33 bp, Homo sapien
cttgcacttgggcttggagaacgaagtcaacag

SEQ ID NO: 1059699 - DNA, 33 bp, Homo sapien
tgttgtgaagagtctacgaaattatgaataata

SEQ ID NO: 1059700 - DNA, 33 bp, Homo sapien
tgttgtgaagagtctatgaaattatgaataata

SEQ ID NO: 1059701 - DNA, 33 bp, Homo sapien
ttgaaaaagagtgtgggaatagtagaagggcct

SEQ ID NO: 1059702 - DNA, 33 bp, Homo sapien
ttgaaaaagagtgtggtaatagtagaagggcct

SEQ ID NO: 1059703 - DNA, 33 bp, Homo sapien
tgtttccagctttggaatattaagaataaagat

SEQ ID NO: 1059704 - DNA, 33 bp, Homo sapien
tgtttccagctttggactattaagaataaagat

SEQ ID NO: 1059705 - DNA, 33 bp, Homo sapien
taaaagggcagaaaaaatgttatggcagtatgt

SEQ ID NO: 1059706 - DNA, 33 bp, Homo sapien
taaaagggcagaaaaagtgttatggcagtatgt

SEQ ID NO: 1059707 - DNA, 33 bp, Homo sapien
taggagctctaagtccaataacaacagcaacaa

SEQ ID NO: 1059708 - DNA, 33 bp, Homo sapien
taggagctctaagtccgataacaacagcaacaa

SEQ ID NO: 1059709 - DNA, 33 bp, Homo sapien
ggaaaatggaagtggacaacctagaatacaagg

SEQ ID NO: 1059710 - DNA, 33 bp, Homo sapien
ggaaaatggaagtggataacctagaatacaagg

SEQ ID NO: 1059711 - DNA, 33 bp, Homo sapien
attcttctctgcaataacttggaaaaacacttg

SEQ ID NO: 1059712 - DNA, 33 bp, Homo sapien
attcttctctgcaatatcttggaaaaacacttg

SEQ ID NO: 1059713 - DNA, 33 bp, Homo sapien
gctattcagtgacatagagaagcctattgaagc

SEQ ID NO: 1059714 - DNA, 33 bp, Homo sapien
gctattcagtgacatatagaagcctattgaagc

SEQ ID NO: 1059715 - DNA, 33 bp, Homo sapien
atatattttgctttggccaaactgtgtatattt

SEQ ID NO: 1059716 - DNA, 33 bp, Homo sapien
atatattttgctttggtcaaactgtgtatattt

SEQ ID NO: 1059717 - DNA, 33 bp, Homo sapien
gtggatgctagagttagaaactgaacacagacc

SEQ ID NO: 1059718 - DNA, 33 bp, Homo sapien
gtggatgctagagttataaactgaacacagacc

SEQ ID NO: 1059719 - DNA, 33 bp, Homo sapien
agtcttagtgtaggaactaggagatgatacaac

SEQ ID NO: 1059720 - DNA, 33 bp, Homo sapien
agtcttagtgtaggaattaggagatgatacaac

SEQ ID NO: 1059721 - DNA, 33 bp, Homo sapien
ggttatagttttccaacaaagggcacttgcatc

SEQ ID NO: 1059722 - DNA, 33 bp, Homo sapien
ggttatagttttccaagaaagggcacttgcatc

SEQ ID NO: 1059723 - DNA, 33 bp, Homo sapien
tcactatccaccactaccacttcaaataccatt

SEQ ID NO: 1059724 - DNA, 33 bp, Homo sapien
tcactatccaccactatcacttcaaataccatt

SEQ ID NO: 1059725 - DNA, 33 bp, Homo sapien
cgttacatgctgttaaaccaattactaagttct

SEQ ID NO: 1059726 - DNA, 33 bp, Homo sapien
cgttacatgctgttaagccaattactaagttct

SEQ ID NO: 1059727 - DNA, 33 bp, Homo sapien
cagcatttgagtagacaagatcttcaagaaata

SEQ ID NO: 1059728 - DNA, 33 bp, Homo sapien
cagcatttgagtagactagatcttcaagaaata

SEQ ID NO: 1059729 - DNA, 33 bp, Homo sapien
tgcttctctggcattacaggatacagcccctgt

SEQ ID NO: 1059730 - DNA, 33 bp, Homo sapien
tgcttctctggcattataggatacagcccctgt

SEQ ID NO: 1059731 - DNA, 33 bp, Homo sapien
tgggggtgaattgctcggaataattgatttata

SEQ ID NO: 1059732 - DNA, 33 bp, Homo sapien
tgggggtgaattgctctgaataattgatttata

SEQ ID NO: 1059733 - DNA, 33 bp, Homo sapien
ttgcatgacaaaacaacagttagctgcaatacc

SEQ ID NO: 1059734 - DNA, 33 bp, Homo sapien
ttgcatgacaaaacaatagttagctgcaatacc

SEQ ID NO: 1059735 - DNA, 33 bp, Homo sapien
ttggacttcacaggctaagaataggattttagg

SEQ ID NO: 1059736 - DNA, 33 bp, Homo sapien
ttggacttcacaggctgagaataggattttagg

SEQ ID NO: 1059737 - DNA, 33 bp, Homo sapien
gtcaaggatctctattcaagacaaggatgtgtt

SEQ ID NO: 1059738 - DNA, 33 bp, Homo sapien
gtcaaggatctctattgaagacaaggatgtgtt

SEQ ID NO: 1059739 - DNA, 33 bp, Homo sapien
aatttatgtgatcttccaggggtattgtaaagc

SEQ ID NO: 1059740 - DNA, 33 bp, Homo sapien
aatttatgtgatcttctaggggtattgtaaagc

SEQ ID NO: 1059741 - DNA, 33 bp, Homo sapien
gagaggaaaatgtccaaatggtctccagggctc

SEQ ID NO: 1059742 - DNA, 33 bp, Homo sapien
gagaggaaaatgtccagatggtctccagggctc

SEQ ID NO: 1059743 - DNA, 33 bp, Homo sapien
tccatctcattgtctccctgacatctcaaactc

SEQ ID NO: 1059744 - DNA, 33 bp, Homo sapien
tccatctcattgtctctctgacatctcaaactc

SEQ ID NO: 1059745 - DNA, 33 bp, Homo sapien
cctcaacggattgcatcatacctacccacattg

SEQ ID NO: 1059746 - DNA, 33 bp, Homo sapien
cctcaacggattgcatgatacctacccacattg

SEQ ID NO: 1059747 - DNA, 33 bp, Homo sapien
gatagatctgaggcacactcattaatgccccag

SEQ ID NO: 1059748 - DNA, 33 bp, Homo sapien
gatagatctgaggcacgctcattaatgccccag

SEQ ID NO: 1059749 - DNA, 33 bp, Homo sapien
ggttggcctttaataactactcaatactaacca

SEQ ID NO: 1059750 - DNA, 33 bp, Homo sapien
ggttggcctttaataagtactcaatactaacca

SEQ ID NO: 1059751 - DNA, 33 bp, Homo sapien
gtgggcttgagatccaaaaggacttaatagaga

SEQ ID NO: 1059752 - DNA, 33 bp, Homo sapien
gtgggcttgagatccagaaggacttaatagaga

SEQ ID NO: 1059753 - DNA, 33 bp, Homo sapien
atctcaagcccacaagaagacataattctgact

SEQ ID NO: 1059754 - DNA, 33 bp, Homo sapien
atctcaagcccacaaggagacataattctgact

SEQ ID NO: 1059755 - DNA, 33 bp, Homo sapien
ggatgtgagtatggacaacctcagtcctgactg

SEQ ID NO: 1059756 - DNA, 33 bp, Homo sapien
ggatgtgagtatggacgacctcagtcctgactg

SEQ ID NO: 1059757 - DNA, 33 bp, Homo sapien
gggaaattctcctagacgacagattgaagccag

SEQ ID NO: 1059758 - DNA, 33 bp, Homo sapien
gggaaattctcctagaggacagattgaagccag

SEQ ID NO: 1059759 - DNA, 33 bp, Homo sapien
ctggattatctgcttacggtttcactgagctaa

SEQ ID NO: 1059760 - DNA, 33 bp, Homo sapien
ctggattatctgcttatggtttcactgagctaa

SEQ ID NO: 1059761 - DNA, 33 bp, Homo sapien
ctagccaaactatggcacgcttttacagattgc

SEQ ID NO: 1059762 - DNA, 33 bp, Homo sapien
ctagccaaactatggcgcgcttttacagattgc

SEQ ID NO: 1059763 - DNA, 33 bp, Homo sapien
cagactgggtatacagaattgcagcagaaaaaa

SEQ ID NO: 1059764 - DNA, 33 bp, Homo sapien
cagactgggtatacagcattgcagcagaaaaaa

SEQ ID NO: 1059765 - DNA, 33 bp, Homo sapien
tgactaccagttacatgactctcccctttctgc

SEQ ID NO: 1059766 - DNA, 33 bp, Homo sapien
tgactaccagttacattactctcccctttctgc

SEQ ID NO: 1059767 - DNA, 33 bp, Homo sapien
tttaaaataagaatcaatagtgtttgctgatgg

SEQ ID NO: 1059768 - DNA, 33 bp, Homo sapien
tttaaaataagaatcagtagtgtttgctgatgg

SEQ ID NO: 1059769 - DNA, 33 bp, Homo sapien
atcatattttgaatgccgattatacgccagata

SEQ ID NO: 1059770 - DNA, 33 bp, Homo sapien
atcatattttgaatgctgattatacgccagata

SEQ ID NO: 1059771 - DNA, 33 bp, Homo sapien
aaatggtcttagtggaataggagggcagaggca

SEQ ID NO: 1059772 - DNA, 33 bp, Homo sapien
aaatggtcttagtggagtaggagggcagaggca

SEQ ID NO: 1059773 - DNA, 33 bp, Homo sapien
aggttctgtgccttgaacatagtaggagatacc

SEQ ID NO: 1059774 - DNA, 33 bp, Homo sapien
aggttctgtgccttgagcatagtaggagatacc

SEQ ID NO: 1059775 - DNA, 33 bp, Homo sapien
tgaattgctgccatatcaggataaaagttcaat

SEQ ID NO: 1059776 - DNA, 33 bp, Homo sapien
tgaattgctgccatatgaggataaaagttcaat

SEQ ID NO: 1059777 - DNA, 33 bp, Homo sapien
ccaaattgtgggttaacaagatgaatgaaacca

SEQ ID NO: 1059778 - DNA, 33 bp, Homo sapien
ccaaattgtgggttaataagatgaatgaaacca

SEQ ID NO: 1059779 - DNA, 33 bp, Homo sapien
aaaaggcaatgtgatacatgagtttgcgaataa

SEQ ID NO: 1059780 - DNA, 33 bp, Homo sapien
aaaaggcaatgtgatatatgagtttgcgaataa

SEQ ID NO: 1059781 - DNA, 33 bp, Homo sapien
aattttatatggttcagctgagtacacacatac

SEQ ID NO: 1059782 - DNA, 33 bp, Homo sapien
aattttatatggttcatctgagtacacacatac

SEQ ID NO: 1059783 - DNA, 33 bp, Homo sapien
aaggagatcaagtaagacacaaactcaaaagta

SEQ ID NO: 1059784 - DNA, 33 bp, Homo sapien
aaggagatcaagtaaggcacaaactcaaaagta

SEQ ID NO: 1059785 - DNA, 33 bp, Homo sapien
tgcaataaattcaacaacatgagtactggctaa

SEQ ID NO: 1059786 - DNA, 33 bp, Homo sapien
tgcaataaattcaacatcatgagtactggctaa

SEQ ID NO: 1059787 - DNA, 33 bp, Homo sapien
tagagttgagttgttacagtgcaggagcaagga

SEQ ID NO: 1059788 - DNA, 33 bp, Homo sapien
tagagttgagttgttatagtgcaggagcaagga

SEQ ID NO: 1059789 - DNA, 33 bp, Homo sapien
tggtgtggatcacaaacatttagtatatcagac

SEQ ID NO: 1059790 - DNA, 33 bp, Homo sapien
tggtgtggatcacaaatatttagtatatcagac

SEQ ID NO: 1059791 - DNA, 33 bp, Homo sapien
atcggaatggaaagaccggtgagaaaaatccac

SEQ ID NO: 1059792 - DNA, 33 bp, Homo sapien
atcggaatggaaagactggtgagaaaaatccac

SEQ ID NO: 1059793 - DNA, 33 bp, Homo sapien
atggaatcttgaaggacgatttgaaattagcca

SEQ ID NO: 1059794 - DNA, 33 bp, Homo sapien
atggaatcttgaaggatgatttgaaattagcca

SEQ ID NO: 1059795 - DNA, 33 bp, Homo sapien
agcccaagtgattccaactttatttgatcagag

SEQ ID NO: 1059796 - DNA, 33 bp, Homo sapien
agcccaagtgattccagctttatttgatcagag

SEQ ID NO: 1059797 - DNA, 33 bp, Homo sapien
cttttatctgctcttacagagatgaggaaatag

SEQ ID NO: 1059798 - DNA, 33 bp, Homo sapien
cttttatctgctcttatagagatgaggaaatag

SEQ ID NO: 1059799 - DNA, 33 bp, Homo sapien
atctggaagacgaagactccttaacttgttcac

SEQ ID NO: 1059800 - DNA, 33 bp, Homo sapien
atctggaagacgaagagtccttaacttgttcac

SEQ ID NO: 1059801 - DNA, 33 bp, Homo sapien
atttttaaaatacatagcaaactgagaaagcaa

SEQ ID NO: 1059802 - DNA, 33 bp, Homo sapien
atttttaaaatacatatcaaactgagaaagcaa

SEQ ID NO: 1059803 - DNA, 33 bp, Homo sapien
gttattttgggcacctaacgtatcttcgttgag

SEQ ID NO: 1059804 - DNA, 33 bp, Homo sapien
gttattttgggcaccttacgtatcttcgttgag

SEQ ID NO: 1059805 - DNA, 33 bp, Homo sapien
cattgcaacccacatcaattcttatatgacagt

SEQ ID NO: 1059806 - DNA, 33 bp, Homo sapien
cattgcaacccacatcgattcttatatgacagt

SEQ ID NO: 1059807 - DNA, 33 bp, Homo sapien
aatgaggataagaatacctaaaaagtctcctta

SEQ ID NO: 1059808 - DNA, 33 bp, Homo sapien
aatgaggataagaatatctaaaaagtctcctta

SEQ ID NO: 1059809 - DNA, 33 bp, Homo sapien
acttataaactagctcaaggtgaaagcttagtc

SEQ ID NO: 1059810 - DNA, 33 bp, Homo sapien
acttataaactagctcgaggtgaaagcttagtc

SEQ ID NO: 1059811 - DNA, 33 bp, Homo sapien
tcaggtaactggcaaacgttcctccttagggaa

SEQ ID NO: 1059812 - DNA, 33 bp, Homo sapien
tcaggtaactggcaaaggttcctccttagggaa

SEQ ID NO: 1059813 - DNA, 33 bp, Homo sapien
atatggaatttacctaaagcataatacaccctc

SEQ ID NO: 1059814 - DNA, 33 bp, Homo sapien
atatggaatttacctagagcataatacaccctc

SEQ ID NO: 1059815 - DNA, 33 bp, Homo sapien
ctcaaaagattctattgaaatgttggcccgtct

SEQ ID NO: 1059816 - DNA, 33 bp, Homo sapien
ctcaaaagattctatttaaatgttggcccgtct

SEQ ID NO: 1059817 - DNA, 33 bp, Homo sapien
tgtcctacatcaggtaaagcatttgctcttcca

SEQ ID NO: 1059818 - DNA, 33 bp, Homo sapien
tgtcctacatcaggtacagcatttgctcttcca

SEQ ID NO: 1059819 - DNA, 33 bp, Homo sapien
tcttcttttccagcaccgtatctttgaatctgc

SEQ ID NO: 1059820 - DNA, 33 bp, Homo sapien
tcttcttttccagcactgtatctttgaatctgc

SEQ ID NO: 1059821 - DNA, 33 bp, Homo sapien
tattactgaaaaggagaagaggatcaggcatac

SEQ ID NO: 1059822 - DNA, 33 bp, Homo sapien
tattactgaaaaggaggagaggatcaggcatac

SEQ ID NO: 1059823 - DNA, 33 bp, Homo sapien
gcttcaatcagccagaccttgctggacttgtta

SEQ ID NO: 1059824 - DNA, 33 bp, Homo sapien
gcttcaatcagccagatcttgctggacttgtta

SEQ ID NO: 1059825 - DNA, 33 bp, Homo sapien
tgggtatgtgtacagacggctacttccgtttct

SEQ ID NO: 1059826 - DNA, 33 bp, Homo sapien
tgggtatgtgtacagatggctacttccgtttct

SEQ ID NO: 1059827 - DNA, 33 bp, Homo sapien
ggtccctcagtatagaactattcagaacagaac

SEQ ID NO: 1059828 - DNA, 33 bp, Homo sapien
ggtccctcagtatagagctattcagaacagaac

SEQ ID NO: 1059829 - DNA, 33 bp, Homo sapien
taactgttgactcttaccactttgagtcttaga

SEQ ID NO: 1059830 - DNA, 33 bp, Homo sapien
taactgttgactcttatcactttgagtcttaga

SEQ ID NO: 1059831 - DNA, 33 bp, Homo sapien
ttaatgtatgtgaaacaaggtctaagaaaaagc

SEQ ID NO: 1059832 - DNA, 33 bp, Homo sapien
ttaatgtatgtgaaacgaggtctaagaaaaagc

SEQ ID NO: 1059833 - DNA, 33 bp, Homo sapien
accaaaatgaaaatatcaaaatcaactcatgta

SEQ ID NO: 1059834 - DNA, 33 bp, Homo sapien
accaaaatgaaaatatgaaaatcaactcatgta

SEQ ID NO: 1059835 - DNA, 33 bp, Homo sapien
tacatatacaattataagagagtcaattccact

SEQ ID NO: 1059836 - DNA, 33 bp, Homo sapien
tacatatacaattataggagagtcaattccact

SEQ ID NO: 1059837 - DNA, 33 bp, Homo sapien
cccatagaactgtacgccctgtcaaaagtcaat

SEQ ID NO: 1059838 - DNA, 33 bp, Homo sapien
cccatagaactgtacgtcctgtcaaaagtcaat

SEQ ID NO: 1059839 - DNA, 33 bp, Homo sapien
tgcagaaccaaagatacgccagggaaatctctt

SEQ ID NO: 1059840 - DNA, 33 bp, Homo sapien
tgcagaaccaaagataggccagggaaatctctt

SEQ ID NO: 1059841 - DNA, 33 bp, Homo sapien
tctatgcttgttctaagtctattcaaattttct

SEQ ID NO: 1059842 - DNA, 33 bp, Homo sapien
tctatgcttgttctaattctattcaaattttct

SEQ ID NO: 1059843 - DNA, 33 bp, Homo sapien
ttaaacatatgtgcccacaaagacttgtagaca

SEQ ID NO: 1059844 - DNA, 33 bp, Homo sapien
ttaaacatatgtgcccgcaaagacttgtagaca

SEQ ID NO: 1059845 - DNA, 33 bp, Homo sapien
acttagtagaagctgaggttaaagccaagctgc

SEQ ID NO: 1059846 - DNA, 33 bp, Homo sapien
acttagtagaagctgatgttaaagccaagctgc

SEQ ID NO: 1059847 - DNA, 33 bp, Homo sapien
ggttgctttaagcaagcctctacctgccttcgg

SEQ ID NO: 1059848 - DNA, 33 bp, Homo sapien
ggttgctttaagcaagtctctacctgccttcgg

SEQ ID NO: 1059849 - DNA, 33 bp, Homo sapien
tcacatacttaggtcacgcacatgagtgtgtat

SEQ ID NO: 1059850 - DNA, 33 bp, Homo sapien
tcacatacttaggtcatgcacatgagtgtgtat

SEQ ID NO: 1059851 - DNA, 33 bp, Homo sapien
tgaaatgttcatggaaacttcaaaaagtcaaat

SEQ ID NO: 1059852 - DNA, 33 bp, Homo sapien
tgaaatgttcatggaaccttcaaaaagtcaaat

SEQ ID NO: 1059853 - DNA, 33 bp, Homo sapien
gggaagtcctgagttcccgaagaagttctctgg

SEQ ID NO: 1059854 - DNA, 33 bp, Homo sapien
gggaagtcctgagttctcgaagaagttctctgg

SEQ ID NO: 1059855 - DNA, 33 bp, Homo sapien
aggagctaaagaaaccgcagcaaatcacttcag

SEQ ID NO: 1059856 - DNA, 33 bp, Homo sapien
aggagctaaagaaacctcagcaaatcacttcag

SEQ ID NO: 1059857 - DNA, 33 bp, Homo sapien
agttcattttctgttcgcacatctctgagcctt

SEQ ID NO: 1059858 - DNA, 33 bp, Homo sapien
agttcattttctgttctcacatctctgagcctt

SEQ ID NO: 1059859 - DNA, 33 bp, Homo sapien
tgagtggaaagtattgaactaacggtcaggtga

SEQ ID NO: 1059860 - DNA, 33 bp, Homo sapien
tgagtggaaagtattggactaacggtcaggtga

SEQ ID NO: 1059861 - DNA, 33 bp, Homo sapien
gctcctggtcttctggaaagtgtgataaggtcc

SEQ ID NO: 1059862 - DNA, 33 bp, Homo sapien
gctcctggtcttctgggaagtgtgataaggtcc

SEQ ID NO: 1059863 - DNA, 33 bp, Homo sapien
acacgatgattttacactggagcacagccatct

SEQ ID NO: 1059864 - DNA, 33 bp, Homo sapien
acacgatgattttacattggagcacagccatct

SEQ ID NO: 1059865 - DNA, 33 bp, Homo sapien
gggtgccaaagtcttcactaatgttctcttctg

SEQ ID NO: 1059866 - DNA, 33 bp, Homo sapien
gggtgccaaagtcttccctaatgttctcttctg

SEQ ID NO: 1059867 - DNA, 33 bp, Homo sapien
ataagataacggtagactcataataaaggaaag

SEQ ID NO: 1059868 - DNA, 33 bp, Homo sapien
ataagataacggtagagtcataataaaggaaag

SEQ ID NO: 1059869 - DNA, 33 bp, Homo sapien
tcaaatcttcgttcacaaggtggtcgcctttct

SEQ ID NO: 1059870 - DNA, 33 bp, Homo sapien
tcaaatcttcgttcacgaggtggtcgcctttct

SEQ ID NO: 1059871 - DNA, 33 bp, Homo sapien
agattcggttatggaccgtcatttccggaagcc

SEQ ID NO: 1059872 - DNA, 33 bp, Homo sapien
agattcggttatggactgtcatttccggaagcc

SEQ ID NO: 1059873 - DNA, 33 bp, Homo sapien
gtgcagcgtgaagtcacgagaaaggggatgaaa

SEQ ID NO: 1059874 - DNA, 33 bp, Homo sapien
gtgcagcgtgaagtcatgagaaaggggatgaaa

SEQ ID NO: 1059875 - DNA, 33 bp, Homo sapien
cacgcaattctatcagacctgtggaaatggttt

SEQ ID NO: 1059876 - DNA, 33 bp, Homo sapien
cacgcaattctatcagccctgtggaaatggttt

SEQ ID NO: 1059877 - DNA, 33 bp, Homo sapien
ctctcctgtaactatgaaacaatgataatagcc

SEQ ID NO: 1059878 - DNA, 33 bp, Homo sapien
ctctcctgtaactatggaacaatgataatagcc

SEQ ID NO: 1059879 - DNA, 33 bp, Homo sapien
tggcagaggaaatgagaagaagactctttatgt

SEQ ID NO: 1059880 - DNA, 33 bp, Homo sapien
tggcagaggaaatgaggagaagactctttatgt

SEQ ID NO: 1059881 - DNA, 33 bp, Homo sapien
aggtgacaggttaggacacagatgaggccctat

SEQ ID NO: 1059882 - DNA, 33 bp, Homo sapien
aggtgacaggttaggatacagatgaggccctat

SEQ ID NO: 1059883 - DNA, 33 bp, Homo sapien
ttggggagagtaattacagtttctgttttcaat

SEQ ID NO: 1059884 - DNA, 33 bp, Homo sapien
ttggggagagtaattatagtttctgttttcaat

SEQ ID NO: 1059885 - DNA, 33 bp, Homo sapien
actggagtacagtgaaaagtaggatagacaagg

SEQ ID NO: 1059886 - DNA, 33 bp, Homo sapien
actggagtacagtgaagagtaggatagacaagg

SEQ ID NO: 1059887 - DNA, 33 bp, Homo sapien
ctgccttccggttgcactctcatgttctacaca

SEQ ID NO: 1059888 - DNA, 33 bp, Homo sapien
ctgccttccggttgcattctcatgttctacaca

SEQ ID NO: 1059889 - DNA, 33 bp, Homo sapien
tcgcagtcgtgagttacggatgtagggcagagt

SEQ ID NO: 1059890 - DNA, 33 bp, Homo sapien
tcgcagtcgtgagttatggatgtagggcagagt

SEQ ID NO: 1059891 - DNA, 33 bp, Homo sapien
gaaagccataagctcactaagttggggtgaaaa

SEQ ID NO: 1059892 - DNA, 33 bp, Homo sapien
gaaagccataagctcattaagttggggtgaaaa

SEQ ID NO: 1059893 - DNA, 33 bp, Homo sapien
tcagaaacaaagccacaaacttctatcttttca

SEQ ID NO: 1059894 - DNA, 33 bp, Homo sapien
tcagaaacaaagccaccaacttctatcttttca

SEQ ID NO: 1059895 - DNA, 33 bp, Homo sapien
ctggcttcacttgccacatacttgttgcagctc

SEQ ID NO: 1059896 - DNA, 33 bp, Homo sapien
ctggcttcacttgccagatacttgttgcagctc

SEQ ID NO: 1059897 - DNA, 33 bp, Homo sapien
atgcacctagcataacacctggcacatattagg

SEQ ID NO: 1059898 - DNA, 33 bp, Homo sapien
atgcacctagcataacgcctggcacatattagg

SEQ ID NO: 1059899 - DNA, 33 bp, Homo sapien
gtaaaaatactggtaaacgggacacatctctag

SEQ ID NO: 1059900 - DNA, 33 bp, Homo sapien
gtaaaaatactggtaatcgggacacatctctag

SEQ ID NO: 1059901 - DNA, 33 bp, Homo sapien
ttaattgggacacattaaactggagatgagtgt

SEQ ID NO: 1059902 - DNA, 33 bp, Homo sapien
ttaattgggacacattgaactggagatgagtgt

SEQ ID NO: 1059903 - DNA, 33 bp, Homo sapien
gtttcgtctttgataacggtttggcattctccc

SEQ ID NO: 1059904 - DNA, 33 bp, Homo sapien
gtttcgtctttgataatggtttggcattctccc

SEQ ID NO: 1059905 - DNA, 33 bp, Homo sapien
catccagggccttctacgtaaagttcaaatcta

SEQ ID NO: 1059906 - DNA, 33 bp, Homo sapien
catccagggccttctatgtaaagttcaaatcta

SEQ ID NO: 1059907 - DNA, 33 bp, Homo sapien
taatggaggaatagagaaaaaacacataagatg

SEQ ID NO: 1059908 - DNA, 33 bp, Homo sapien
taatggaggaatagagtaaaaacacataagatg

SEQ ID NO: 1059909 - DNA, 33 bp, Homo sapien
tggtgagagtgaagataaactaaatctcataca

SEQ ID NO: 1059910 - DNA, 33 bp, Homo sapien
tggtgagagtgaagatgaactaaatctcataca

SEQ ID NO: 1059911 - DNA, 33 bp, Homo sapien
tgacccaggaagtgtacagtatttgaaagtgga

SEQ ID NO: 1059912 - DNA, 33 bp, Homo sapien
tgacccaggaagtgtagagtatttgaaagtgga

SEQ ID NO: 1059913 - DNA, 33 bp, Homo sapien
ataatgtcatagcacaatgcatcactcacatat

SEQ ID NO: 1059914 - DNA, 33 bp, Homo sapien
ataatgtcatagcacagtgcatcactcacatat

SEQ ID NO: 1059915 - DNA, 33 bp, Homo sapien
tccttctggtggtacaagacatggaggtagaag

SEQ ID NO: 1059916 - DNA, 33 bp, Homo sapien
tccttctggtggtacaggacatggaggtagaag

SEQ ID NO: 1059917 - DNA, 33 bp, Homo sapien
tctggctttgctgcacaactgtgggtaagttct

SEQ ID NO: 1059918 - DNA, 33 bp, Homo sapien
tctggctttgctgcacgactgtgggtaagttct

SEQ ID NO: 1059919 - DNA, 33 bp, Homo sapien
agctctcttggatgaaacctcttttgggtagcc

SEQ ID NO: 1059920 - DNA, 33 bp, Homo sapien
agctctcttggatgaagcctcttttgggtagcc

SEQ ID NO: 1059921 - DNA, 33 bp, Homo sapien
atcattattggttgacagggagctaccctcaca

SEQ ID NO: 1059922 - DNA, 33 bp, Homo sapien
atcattattggttgactgggagctaccctcaca

SEQ ID NO: 1059923 - DNA, 33 bp, Homo sapien
agccaggacctgaaagacagctttttctgacat

SEQ ID NO: 1059924 - DNA, 33 bp, Homo sapien
agccaggacctgaaaggcagctttttctgacat

SEQ ID NO: 1059925 - DNA, 33 bp, Homo sapien
aaattatgtactgatacgtcttgactctccaat

SEQ ID NO: 1059926 - DNA, 33 bp, Homo sapien
aaattatgtactgatatgtcttgactctccaat

SEQ ID NO: 1059927 - DNA, 33 bp, Homo sapien
aatcctttcttcacaccatttagaaatgaaatt

SEQ ID NO: 1059928 - DNA, 33 bp, Homo sapien
aatcctttcttcacactatttagaaatgaaatt

SEQ ID NO: 1059929 - DNA, 33 bp, Homo sapien
taccgatttgaaaagccgccttcattaaacagc

SEQ ID NO: 1059930 - DNA, 33 bp, Homo sapien
taccgatttgaaaagctgccttcattaaacagc

SEQ ID NO: 1059931 - DNA, 33 bp, Homo sapien
ctgttcaaacaaccttgaaggcagaggacagag

SEQ ID NO: 1059932 - DNA, 33 bp, Homo sapien
ctgttcaaacaacctttaaggcagaggacagag

SEQ ID NO: 1059933 - DNA, 33 bp, Homo sapien
ctgggcagctgaaagagcctcaaagctaaaggg

SEQ ID NO: 1059934 - DNA, 33 bp, Homo sapien
ctgggcagctgaaagatcctcaaagctaaaggg

SEQ ID NO: 1059935 - DNA, 33 bp, Homo sapien
gaatagttgaacttaaagtgtcttgactgatgt

SEQ ID NO: 1059936 - DNA, 33 bp, Homo sapien
gaatagttgaacttaaggtgtcttgactgatgt

SEQ ID NO: 1059937 - DNA, 33 bp, Homo sapien
ggcctttagacacctacatccgctctgcccggt

SEQ ID NO: 1059938 - DNA, 33 bp, Homo sapien
ggcctttagacacctatatccgctctgcccggt

SEQ ID NO: 1059939 - DNA, 33 bp, Homo sapien
aatggaaagatgccccacacatacgttaagttt

SEQ ID NO: 1059940 - DNA, 33 bp, Homo sapien
aatggaaagatgccccgcacatacgttaagttt

SEQ ID NO: 1059941 - DNA, 33 bp, Homo sapien
ccctgtataattgtgacaaccataagtccctag

SEQ ID NO: 1059942 - DNA, 33 bp, Homo sapien
ccctgtataattgtgataaccataagtccctag

SEQ ID NO: 1059943 - DNA, 33 bp, Homo sapien
agctgatgagtagtcaagtgactcttccaacct

SEQ ID NO: 1059944 - DNA, 33 bp, Homo sapien
agctgatgagtagtcaggtgactcttccaacct

SEQ ID NO: 1059945 - DNA, 33 bp, Homo sapien
gatactgttgcacggcaataactgtggatgtgc

SEQ ID NO: 1059946 - DNA, 33 bp, Homo sapien
gatactgttgcacggcgataactgtggatgtgc

SEQ ID NO: 1059947 - DNA, 33 bp, Homo sapien
acttgcagtgagagaaaaagaatgacatcttgc

SEQ ID NO: 1059948 - DNA, 33 bp, Homo sapien
acttgcagtgagagaagaagaatgacatcttgc

SEQ ID NO: 1059949 - DNA, 33 bp, Homo sapien
aagggaaggcacccaacgaggcagggaagtatg

SEQ ID NO: 1059950 - DNA, 33 bp, Homo sapien
aagggaaggcacccaatgaggcagggaagtatg

SEQ ID NO: 1059951 - DNA, 33 bp, Homo sapien
ctcttagaccacatcacgttcctggttctggct

SEQ ID NO: 1059952 - DNA, 33 bp, Homo sapien
ctcttagaccacatcatgttcctggttctggct

SEQ ID NO: 1059953 - DNA, 33 bp, Homo sapien
ttctcatgttatagataaaaaaaacgaggccca

SEQ ID NO: 1059954 - DNA, 33 bp, Homo sapien
ttctcatgttatagatgaaaaaaacgaggccca

SEQ ID NO: 1059955 - DNA, 33 bp, Homo sapien
acacaacactatttcaaatcatcttatgtattt

SEQ ID NO: 1059956 - DNA, 33 bp, Homo sapien
acacaacactatttcagatcatcttatgtattt

SEQ ID NO: 1059957 - DNA, 33 bp, Homo sapien
gccactatctgtttcacggatacaaagacagaa

SEQ ID NO: 1059958 - DNA, 33 bp, Homo sapien
gccactatctgtttcatggatacaaagacagaa

SEQ ID NO: 1059959 - DNA, 33 bp, Homo sapien
ccagaaggtgtgaggaagtctctaggcttggct

SEQ ID NO: 1059960 - DNA, 33 bp, Homo sapien
ccagaaggtgtgaggatgtctctaggcttggct

SEQ ID NO: 1059961 - DNA, 33 bp, Homo sapien
tgaaaacaggttgttacgggcctagtcaggaaa

SEQ ID NO: 1059962 - DNA, 33 bp, Homo sapien
tgaaaacaggttgttatgggcctagtcaggaaa

SEQ ID NO: 1059963 - DNA, 33 bp, Homo sapien
ttcatctactgatttaacaaatattgattgaat

SEQ ID NO: 1059964 - DNA, 33 bp, Homo sapien
ttcatctactgatttagcaaatattgattgaat

SEQ ID NO: 1059965 - DNA, 33 bp, Homo sapien
agcatcagaaatattccagggaagggctactgg

SEQ ID NO: 1059966 - DNA, 33 bp, Homo sapien
agcatcagaaatattctagggaagggctactgg

SEQ ID NO: 1059967 - DNA, 33 bp, Homo sapien
tgataacttacttagagagcttgagaaggtggc

SEQ ID NO: 1059968 - DNA, 33 bp, Homo sapien
tgataacttacttagatagcttgagaaggtggc

SEQ ID NO: 1059969 - DNA, 33 bp, Homo sapien
attcatggagtgaatacatgagttttgacttcc

SEQ ID NO: 1059970 - DNA, 33 bp, Homo sapien
attcatggagtgaatatatgagttttgacttcc

SEQ ID NO: 1059971 - DNA, 33 bp, Homo sapien
tcaagttgacagcaagcatgagggaggctagat

SEQ ID NO: 1059972 - DNA, 33 bp, Homo sapien
tcaagttgacagcaaggatgagggaggctagat

SEQ ID NO: 1059973 - DNA, 33 bp, Homo sapien
taataataacccctccactcagcttggcaaggg

SEQ ID NO: 1059974 - DNA, 33 bp, Homo sapien
taataataacccctccgctcagcttggcaaggg

SEQ ID NO: 1059975 - DNA, 33 bp, Homo sapien
tttgcctatttgtctacatgcccagagagagca

SEQ ID NO: 1059976 - DNA, 33 bp, Homo sapien
tttgcctatttgtctatatgcccagagagagca

SEQ ID NO: 1059977 - DNA, 33 bp, Homo sapien
agcatgctggggatataagaacgcaggtgaggt

SEQ ID NO: 1059978 - DNA, 33 bp, Homo sapien
agcatgctggggatatgagaacgcaggtgaggt

SEQ ID NO: 1059979 - DNA, 33 bp, Homo sapien
tctattgtgtctcccaaatgaatttaaccacaa

SEQ ID NO: 1059980 - DNA, 33 bp, Homo sapien
tctattgtgtctcccagatgaatttaaccacaa

SEQ ID NO: 1059981 - DNA, 33 bp, Homo sapien
aagattagctgggttgaacaagaattgcgtttc

SEQ ID NO: 1059982 - DNA, 33 bp, Homo sapien
aagattagctgggttgcacaagaattgcgtttc

SEQ ID NO: 1059983 - DNA, 33 bp, Homo sapien
atttctgagtgttctgcagtccctgattcttgg

SEQ ID NO: 1059984 - DNA, 33 bp, Homo sapien
atttctgagtgttctgtagtccctgattcttgg

SEQ ID NO: 1059985 - DNA, 33 bp, Homo sapien
tgccatgagatttaatcagtacctcctcagtgt

SEQ ID NO: 1059986 - DNA, 33 bp, Homo sapien
tgccatgagatttaattagtacctcctcagtgt

SEQ ID NO: 1059987 - DNA, 33 bp, Homo sapien
gactggaattagaatcccagagttgctgtgtga

SEQ ID NO: 1059988 - DNA, 33 bp, Homo sapien
gactggaattagaatcgcagagttgctgtgtga

SEQ ID NO: 1059989 - DNA, 33 bp, Homo sapien
gatctcgtggaggcaaggaataaaatagtggtt

SEQ ID NO: 1059990 - DNA, 33 bp, Homo sapien
gatctcgtggaggcaatgaataaaatagtggtt

SEQ ID NO: 1059991 - DNA, 33 bp, Homo sapien
gctggagaactgggtaacgttgggcagaatagc

SEQ ID NO: 1059992 - DNA, 33 bp, Homo sapien
gctggagaactgggtaccgttgggcagaatagc

SEQ ID NO: 1059993 - DNA, 33 bp, Homo sapien
gagaaagagagagggaaaaaagacagagaaata

SEQ ID NO: 1059994 - DNA, 33 bp, Homo sapien
gagaaagagagagggacaaaagacagagaaata

SEQ ID NO: 1059995 - DNA, 33 bp, Homo sapien
tgaaatgaccaaccctaaaaagcatgagaaagc

SEQ ID NO: 1059996 - DNA, 33 bp, Homo sapien
tgaaatgaccaaccctgaaaagcatgagaaagc

SEQ ID NO: 1059997 - DNA, 33 bp, Homo sapien
gttctttcagctccctaacagttacagacacat

SEQ ID NO: 1059998 - DNA, 33 bp, Homo sapien
gttctttcagctccctgacagttacagacacat

SEQ ID NO: 1059999 - DNA, 33 bp, Homo sapien
tgtcttgcccagtgaaccttacctggaatcaga

SEQ ID NO: 1060000 - DNA, 33 bp, Homo sapien
tgtcttgcccagtgaatcttacctggaatcaga

SEQ ID NO: 1060001 - DNA, 33 bp, Homo sapien
tgcataaggtgttacaatgcccttgaatggggt

SEQ ID NO: 1060002 - DNA, 33 bp, Homo sapien
tgcataaggtgttacagtgcccttgaatggggt

SEQ ID NO: 1060003 - DNA, 33 bp, Homo sapien
gatgtcaagaaaatcaacaacaggttggaaagg

SEQ ID NO: 1060004 - DNA, 33 bp, Homo sapien
gatgtcaagaaaatcagcaacaggttggaaagg

SEQ ID NO: 1060005 - DNA, 33 bp, Homo sapien
aatggtaacatttgtacagcacagtaggataaa

SEQ ID NO: 1060006 - DNA, 33 bp, Homo sapien
aatggtaacatttgtatagcacagtaggataaa

SEQ ID NO: 1060007 - DNA, 33 bp, Homo sapien
cagagaaagaaaccacaaaagcttctgtcgcct

SEQ ID NO: 1060008 - DNA, 33 bp, Homo sapien
cagagaaagaaaccacgaaagcttctgtcgcct

SEQ ID NO: 1060009 - DNA, 33 bp, Homo sapien
aagacggatgcatacaaaaaaagaatcaccgag

SEQ ID NO: 1060010 - DNA, 33 bp, Homo sapien
aagacggatgcatacacaaaaagaatcaccgag

SEQ ID NO: 1060011 - DNA, 33 bp, Homo sapien
aggagtgcctctaacaaacttgtggaaagagat

SEQ ID NO: 1060012 - DNA, 33 bp, Homo sapien
aggagtgcctctaacatacttgtggaaagagat

SEQ ID NO: 1060013 - DNA, 33 bp, Homo sapien
attaagaagtaattccaactggacgcagtggct

SEQ ID NO: 1060014 - DNA, 33 bp, Homo sapien
attaagaagtaattccgactggacgcagtggct

SEQ ID NO: 1060015 - DNA, 33 bp, Homo sapien
agctaagtatagaaggaagctgagtagaggtct

SEQ ID NO: 1060016 - DNA, 33 bp, Homo sapien
agctaagtatagaagggagctgagtagaggtct

SEQ ID NO: 1060017 - DNA, 33 bp, Homo sapien
ccaagaagactgtgacgcaggtttctgtagtac

SEQ ID NO: 1060018 - DNA, 33 bp, Homo sapien
ccaagaagactgtgactcaggtttctgtagtac

SEQ ID NO: 1060019 - DNA, 33 bp, Homo sapien
ttcttcagagagggaaccagagctgagggggag

SEQ ID NO: 1060020 - DNA, 33 bp, Homo sapien
ttcttcagagagggaatcagagctgagggggag

SEQ ID NO: 1060021 - DNA, 33 bp, Homo sapien
gctgggcactacctctgacagttggaggagatt

SEQ ID NO: 1060022 - DNA, 33 bp, Homo sapien
gctgggcactacctcttacagttggaggagatt

SEQ ID NO: 1060023 - DNA, 33 bp, Homo sapien
ttgttcacattcagataagtccctgtatttcca

SEQ ID NO: 1060024 - DNA, 33 bp, Homo sapien
ttgttcacattcagatgagtccctgtatttcca

SEQ ID NO: 1060025 - DNA, 33 bp, Homo sapien
tgcttaaggaagattagctgtgtcctctaggta

SEQ ID NO: 1060026 - DNA, 33 bp, Homo sapien
tgcttaaggaagattatctgtgtcctctaggta

SEQ ID NO: 1060027 - DNA, 33 bp, Homo sapien
ttccttgccccttgtaccatttaagcagtggtg

SEQ ID NO: 1060028 - DNA, 33 bp, Homo sapien
ttccttgccccttgtatcatttaagcagtggtg

SEQ ID NO: 1060029 - DNA, 33 bp, Homo sapien
ttggacaagtatcccaaaaaagtgaaaatctat

SEQ ID NO: 1060030 - DNA, 33 bp, Homo sapien
ttggacaagtatcccagaaaagtgaaaatctat

SEQ ID NO: 1060031 - DNA, 33 bp, Homo sapien
tgactgttgtaacacactagcacaaacttagca

SEQ ID NO: 1060032 - DNA, 33 bp, Homo sapien
tgactgttgtaacacattagcacaaacttagca

SEQ ID NO: 1060033 - DNA, 33 bp, Homo sapien
tggcaaacataatgccacttctcactcctctgt

SEQ ID NO: 1060034 - DNA, 33 bp, Homo sapien
tggcaaacataatgccgcttctcactcctctgt

SEQ ID NO: 1060035 - DNA, 33 bp, Homo sapien
ccttctttgcctgatacggtaacacataaagct

SEQ ID NO: 1060036 - DNA, 33 bp, Homo sapien
ccttctttgcctgatatggtaacacataaagct

SEQ ID NO: 1060037 - DNA, 33 bp, Homo sapien
aagtcatggtgtactcaaagattttctgattta

SEQ ID NO: 1060038 - DNA, 33 bp, Homo sapien
aagtcatggtgtactcgaagattttctgattta

SEQ ID NO: 1060039 - DNA, 33 bp, Homo sapien
cctgagttttaaaggacagcaggaaagcctaga

SEQ ID NO: 1060040 - DNA, 33 bp, Homo sapien
cctgagttttaaaggagagcaggaaagcctaga

SEQ ID NO: 1060041 - DNA, 33 bp, Homo sapien
atgtaattggagtctccgaaagggaagaaggca

SEQ ID NO: 1060042 - DNA, 33 bp, Homo sapien
atgtaattggagtctctgaaagggaagaaggca

SEQ ID NO: 1060043 - DNA, 33 bp, Homo sapien
atctatgttcttcaaactcacctttgaactggt

SEQ ID NO: 1060044 - DNA, 33 bp, Homo sapien
atctatgttcttcaaattcacctttgaactggt

SEQ ID NO: 1060045 - DNA, 33 bp, Homo sapien
tctagaagcttatagacccttttcatagggaag

SEQ ID NO: 1060046 - DNA, 33 bp, Homo sapien
tctagaagcttatagatccttttcatagggaag

SEQ ID NO: 1060047 - DNA, 33 bp, Homo sapien
aattcaatggctcgcccgaagaaaaggagaccc

SEQ ID NO: 1060048 - DNA, 33 bp, Homo sapien
aattcaatggctcgcctgaagaaaaggagaccc

SEQ ID NO: 1060049 - DNA, 33 bp, Homo sapien
ctgacaatatgattcaatacctagaaaactcta

SEQ ID NO: 1060050 - DNA, 33 bp, Homo sapien
ctgacaatatgattcagtacctagaaaactcta

SEQ ID NO: 1060051 - DNA, 33 bp, Homo sapien
attttcttcaagaacaataataccaaattacaa

SEQ ID NO: 1060052 - DNA, 33 bp, Homo sapien
attttcttcaagaacattaataccaaattacaa

SEQ ID NO: 1060053 - DNA, 33 bp, Homo sapien
taaaatatatgagttgcagaattttcttcaaga

SEQ ID NO: 1060054 - DNA, 33 bp, Homo sapien
taaaatatatgagttgtagaattttcttcaaga

SEQ ID NO: 1060055 - DNA, 33 bp, Homo sapien
ttgcagtcagcgcaacaaagcattatttctgta

SEQ ID NO: 1060056 - DNA, 33 bp, Homo sapien
ttgcagtcagcgcaacgaagcattatttctgta

SEQ ID NO: 1060057 - DNA, 33 bp, Homo sapien
taggttgggatcactcgcaggtttaccattgac

SEQ ID NO: 1060058 - DNA, 33 bp, Homo sapien
taggttgggatcactctcaggtttaccattgac

SEQ ID NO: 1060059 - DNA, 33 bp, Homo sapien
aaattctactcaaaccaaagaaacaggaaggtc

SEQ ID NO: 1060060 - DNA, 33 bp, Homo sapien
aaattctactcaaaccgaagaaacaggaaggtc

SEQ ID NO: 1060061 - DNA, 33 bp, Homo sapien
atacgcaataaaaatgcagacaaatcgcttgag

SEQ ID NO: 1060062 - DNA, 33 bp, Homo sapien
atacgcaataaaaatggagacaaatcgcttgag

SEQ ID NO: 1060063 - DNA, 33 bp, Homo sapien
catctttatacacaaaaagcaaacgttaagcat

SEQ ID NO: 1060064 - DNA, 33 bp, Homo sapien
catctttatacacaaagagcaaacgttaagcat

SEQ ID NO: 1060065 - DNA, 33 bp, Homo sapien
tcatccagataattgagcataagccaaaagttc

SEQ ID NO: 1060066 - DNA, 33 bp, Homo sapien
tcatccagataattgatcataagccaaaagttc

SEQ ID NO: 1060067 - DNA, 33 bp, Homo sapien
aatctataaattctataaggacataaacagcta

SEQ ID NO: 1060068 - DNA, 33 bp, Homo sapien
aatctataaattctattaggacataaacagcta

SEQ ID NO: 1060069 - DNA, 33 bp, Homo sapien
tcaaagaggggacctaaggacctataagacact

SEQ ID NO: 1060070 - DNA, 33 bp, Homo sapien
tcaaagaggggacctatggacctataagacact

SEQ ID NO: 1060071 - DNA, 33 bp, Homo sapien
acaggcatggagaagtaaagtaattactcattg

SEQ ID NO: 1060072 - DNA, 33 bp, Homo sapien
acaggcatggagaagttaagtaattactcattg

SEQ ID NO: 1060073 - DNA, 33 bp, Homo sapien
tccgccttatttacaaagtggcaatgagtaatt

SEQ ID NO: 1060074 - DNA, 33 bp, Homo sapien
tccgccttatttacaatgtggcaatgagtaatt

SEQ ID NO: 1060075 - DNA, 33 bp, Homo sapien
ttatcaacatatctgaaactcttttgtatttag

SEQ ID NO: 1060076 - DNA, 33 bp, Homo sapien
ttatcaacatatctgagactcttttgtatttag

SEQ ID NO: 1060077 - DNA, 33 bp, Homo sapien
cactggatgaagcccaagtaaccaagcactcac

SEQ ID NO: 1060078 - DNA, 33 bp, Homo sapien
cactggatgaagcccatgtaaccaagcactcac

SEQ ID NO: 1060079 - DNA, 33 bp, Homo sapien
gtatattctgaggaaaacctgcattggaatatt

SEQ ID NO: 1060080 - DNA, 33 bp, Homo sapien
gtatattctgaggaaatcctgcattggaatatt

SEQ ID NO: 1060081 - DNA, 33 bp, Homo sapien
accagtgtgaaaatcaatattatacaaaggcag

SEQ ID NO: 1060082 - DNA, 33 bp, Homo sapien
accagtgtgaaaatcagtattatacaaaggcag

SEQ ID NO: 1060083 - DNA, 33 bp, Homo sapien
taaaaattaagcttgcaatctttagtaatcgct

SEQ ID NO: 1060084 - DNA, 33 bp, Homo sapien
taaaaattaagcttgcgatctttagtaatcgct

SEQ ID NO: 1060085 - DNA, 33 bp, Homo sapien
tcataagtatggctacaaaattaaaaaaacaag

SEQ ID NO: 1060086 - DNA, 33 bp, Homo sapien
tcataagtatggctacgaaattaaaaaaacaag

SEQ ID NO: 1060087 - DNA, 33 bp, Homo sapien; identical to SEQ ID NO: 1060085

SEQ ID NO: 1060088 - DNA, 33 bp, Homo sapien; identical to SEQ ID NO: 1060086

SEQ ID NO: 1060089 - DNA, 33 bp, Homo sapien
ctctaaaggtgtattaaagaatagctctaacta

SEQ ID NO: 1060090 - DNA, 33 bp, Homo sapien
ctctaaaggtgtattatagaatagctctaacta

SEQ ID NO: 1060091 - DNA, 33 bp, Homo sapien
aggatgactgaaattacggagtaacgctaaatg

SEQ ID NO: 1060092 - DNA, 33 bp, Homo sapien
aggatgactgaaattatggagtaacgctaaatg

SEQ ID NO: 1060093 - DNA, 33 bp, Homo sapien
cagtttgcagctcagacgttacacttattagga

SEQ ID NO: 1060094 - DNA, 33 bp, Homo sapien
cagtttgcagctcagatgttacacttattagga

SEQ ID NO: 1060095 - DNA, 33 bp, Homo sapien
tctaagctctgtattacgccaataaatggtgaa

SEQ ID NO: 1060096 - DNA, 33 bp, Homo sapien
tctaagctctgtattatgccaataaatggtgaa

SEQ ID NO: 1060097 - DNA, 33 bp, Homo sapien
gcaatgacagaaaggacaattacatgggtgcat

SEQ ID NO: 1060098 - DNA, 33 bp, Homo sapien
gcaatgacagaaaggagaattacatgggtgcat

SEQ ID NO: 1060099 - DNA, 33 bp, Homo sapien
gaacttgtcaatcaataatgtgaacaaagaaaa

SEQ ID NO: 1060100 - DNA, 33 bp, Homo sapien
gaacttgtcaatcaattatgtgaacaaagaaaa

SEQ ID NO: 1060101 - DNA, 33 bp, Homo sapien
atgaacatgtgaccaaaaaagaaacagacaaat

SEQ ID NO: 1060102 - DNA, 33 bp, Homo sapien
atgaacatgtgaccaagaaagaaacagacaaat

SEQ ID NO: 1060103 - DNA, 33 bp, Homo sapien
gtttgcttttgctatacaaaaatgtgtcctgtt

SEQ ID NO: 1060104 - DNA, 33 bp, Homo sapien
gtttgcttttgctatataaaaatgtgtcctgtt

SEQ ID NO: 1060105 - DNA, 33 bp, Homo sapien
gaaactgcaaacgtaaggacatcccacatattt

SEQ ID NO: 1060106 - DNA, 33 bp, Homo sapien
gaaactgcaaacgtaatgacatcccacatattt

SEQ ID NO: 1060107 - DNA, 33 bp, Homo sapien
acctgggaagtaaaccaagattctgactccaag

SEQ ID NO: 1060108 - DNA, 33 bp, Homo sapien
acctgggaagtaaaccgagattctgactccaag

SEQ ID NO: 1060109 - DNA, 33 bp, Homo sapien
tgtgaaaggtgtggtgaatgtagagccagggct

SEQ ID NO: 1060110 - DNA, 33 bp, Homo sapien
tgtgaaaggtgtggtggatgtagagccagggct

SEQ ID NO: 1060111 - DNA, 33 bp, Homo sapien
agaagctgcaactacaatagcctcaagtgaaag

SEQ ID NO: 1060112 - DNA, 33 bp, Homo sapien
agaagctgcaactacagtagcctcaagtgaaag

SEQ ID NO: 1060113 - DNA, 33 bp, Homo sapien
tgagcaaacaacgcccaaaataccctctgctac

SEQ ID NO: 1060114 - DNA, 33 bp, Homo sapien
tgagcaaacaacgcccgaaataccctctgctac

SEQ ID NO: 1060115 - DNA, 33 bp, Homo sapien
caaatttaacatttcacagtgaagcatcctaaa

SEQ ID NO: 1060116 - DNA, 33 bp, Homo sapien
caaatttaacatttcatagtgaagcatcctaaa

SEQ ID NO: 1060117 - DNA, 33 bp, Homo sapien
cacttgccctatgtgaactagtgaggaaggggc

SEQ ID NO: 1060118 - DNA, 33 bp, Homo sapien
cacttgccctatgtgagctagtgaggaaggggc

SEQ ID NO: 1060119 - DNA, 33 bp, Homo sapien
ttgaatttgagttgacccttgaaggacaaatag

SEQ ID NO: 1060120 - DNA, 33 bp, Homo sapien
ttgaatttgagttgactcttgaaggacaaatag

SEQ ID NO: 1060121 - DNA, 33 bp, Homo sapien
tcctgaggaattcgacaatttatccatccatgt

SEQ ID NO: 1060122 - DNA, 33 bp, Homo sapien
tcctgaggaattcgaccatttatccatccatgt

SEQ ID NO: 1060123 - DNA, 33 bp, Homo sapien
aaccaccaattagagacagttgggtcaggtggc

SEQ ID NO: 1060124 - DNA, 33 bp, Homo sapien
aaccaccaattagagatagttgggtcaggtggc

SEQ ID NO: 1060125 - DNA, 33 bp, Homo sapien
aggccaggcttgatacaaatgaggcctgtctca

SEQ ID NO: 1060126 - DNA, 33 bp, Homo sapien
aggccaggcttgatacgaatgaggcctgtctca

SEQ ID NO: 1060127 - DNA, 33 bp, Homo sapien
atgagagcctgcctaagaaaccaaagcaggaca

SEQ ID NO: 1060128 - DNA, 33 bp, Homo sapien
atgagagcctgcctaataaaccaaagcaggaca

SEQ ID NO: 1060129 - DNA, 33 bp, Homo sapien
tcattgctgaagggagactagttggcatagggt

SEQ ID NO: 1060130 - DNA, 33 bp, Homo sapien
tcattgctgaagggagcctagttggcatagggt

SEQ ID NO: 1060131 - DNA, 33 bp, Homo sapien
ttttgtgcctgaatgacggtcctgaagcctttt

SEQ ID NO: 1060132 - DNA, 33 bp, Homo sapien
ttttgtgcctgaatgatggtcctgaagcctttt

SEQ ID NO: 1060133 - DNA, 33 bp, Homo sapien
cattggcctacagagaaagcttctgcaaggaga

SEQ ID NO: 1060134 - DNA, 33 bp, Homo sapien
cattggcctacagagagagcttctgcaaggaga

SEQ ID NO: 1060135 - DNA, 33 bp, Homo sapien
aaggaggtaagataaactgaaagagcatgggct

SEQ ID NO: 1060136 - DNA, 33 bp, Homo sapien
aaggaggtaagataaattgaaagagcatgggct

SEQ ID NO: 1060137 - DNA, 33 bp, Homo sapien
tttatatactgagtgacagataggaagccaggg

SEQ ID NO: 1060138 - DNA, 33 bp, Homo sapien
tttatatactgagtgagagataggaagccaggg

SEQ ID NO: 1060139 - DNA, 33 bp, Homo sapien
taataatattcataaccgaaaaaccagctcctc

SEQ ID NO: 1060140 - DNA, 33 bp, Homo sapien
taataatattcataactgaaaaaccagctcctc

SEQ ID NO: 1060141 - DNA, 33 bp, Homo sapien
cacaggagaggagatccgaggctgacaccacac

SEQ ID NO: 1060142 - DNA, 33 bp, Homo sapien
cacaggagaggagatcggaggctgacaccacac

SEQ ID NO: 1060143 - DNA, 33 bp, Homo sapien
ctgttcgaaactggtaaacagttactggacgaa

SEQ ID NO: 1060144 - DNA, 33 bp, Homo sapien
ctgttcgaaactggtagacagttactggacgaa

SEQ ID NO: 1060145 - DNA, 33 bp, Homo sapien
ctggtaaggaccatgacgaataataaagttagg

SEQ ID NO: 1060146 - DNA, 33 bp, Homo sapien
ctggtaaggaccatgaggaataataaagttagg

SEQ ID NO: 1060147 - DNA, 33 bp, Homo sapien
aatattttctcccagacgctcattcaggggttc

SEQ ID NO: 1060148 - DNA, 33 bp, Homo sapien
aatattttctcccagatgctcattcaggggttc

SEQ ID NO: 1060149 - DNA, 33 bp, Homo sapien
atgactttcttctctccatatagctaaagtcaa

SEQ ID NO: 1060150 - DNA, 33 bp, Homo sapien
atgactttcttctctcgatatagctaaagtcaa

SEQ ID NO: 1060151 - DNA, 33 bp, Homo sapien
ctgatctctttgcctacagtttctcttgctctc

SEQ ID NO: 1060152 - DNA, 33 bp, Homo sapien
ctgatctctttgcctatagtttctcttgctctc

SEQ ID NO: 1060153 - DNA, 33 bp, Homo sapien
ttcctgaaacagacacaatcatgctactcttct

SEQ ID NO: 1060154 - DNA, 33 bp, Homo sapien
ttcctgaaacagacacgatcatgctactcttct

SEQ ID NO: 1060155 - DNA, 33 bp, Homo sapien
acatggctggtttatcaaagaggcatatctgtg

SEQ ID NO: 1060156 - DNA, 33 bp, Homo sapien
acatggctggtttatctaagaggcatatctgtg

SEQ ID NO: 1060157 - DNA, 33 bp, Homo sapien
accaagattgtcttaccccagagactgtaccct

SEQ ID NO: 1060158 - DNA, 33 bp, Homo sapien
accaagattgtcttactccagagactgtaccct

SEQ ID NO: 1060159 - DNA, 33 bp, Homo sapien
gtaaactaccatactaaccatctaagcatgaaa

SEQ ID NO: 1060160 - DNA, 33 bp, Homo sapien
gtaaactaccatactagccatctaagcatgaaa

SEQ ID NO: 1060161 - DNA, 33 bp, Homo sapien
ttgtgtgatgattacaacaatcaaattaatcaa

SEQ ID NO: 1060162 - DNA, 33 bp, Homo sapien
ttgtgtgatgattacagcaatcaaattaatcaa

SEQ ID NO: 1060163 - DNA, 33 bp, Homo sapien
cagagatgagagagtacgaggcacacttaatat

SEQ ID NO: 1060164 - DNA, 33 bp, Homo sapien
cagagatgagagagtatgaggcacacttaatat

SEQ ID NO: 1060165 - DNA, 33 bp, Homo sapien
ctgctgtgttttctgactcaccagttccctgtc

SEQ ID NO: 1060166 - DNA, 33 bp, Homo sapien
ctgctgtgttttctgattcaccagttccctgtc

SEQ ID NO: 1060167 - DNA, 33 bp, Homo sapien
tacctgaaagtgacaaatgcaaagggaaatttc

SEQ ID NO: 1060168 - DNA, 33 bp, Homo sapien
tacctgaaagtgacaagtgcaaagggaaatttc

SEQ ID NO: 1060169 - DNA, 33 bp, Homo sapien
atgcctgtgggaccaacggcaggcttaggtcag

SEQ ID NO: 1060170 - DNA, 33 bp, Homo sapien
atgcctgtgggaccaatggcaggcttaggtcag

SEQ ID NO: 1060171 - DNA, 33 bp, Homo sapien
gagatggagggattacacttgacagatggtggc

SEQ ID NO: 1060172 - DNA, 33 bp, Homo sapien
gagatggagggattacgcttgacagatggtggc

SEQ ID NO: 1060173 - DNA, 33 bp, Homo sapien
tcctgaccgcatctcacagctactgggtggaag

SEQ ID NO: 1060174 - DNA, 33 bp, Homo sapien
tcctgaccgcatctcatagctactgggtggaag

SEQ ID NO: 1060175 - DNA, 33 bp, Homo sapien
tttcactgtaatagaccgctggtatcagctggc

SEQ ID NO: 1060176 - DNA, 33 bp, Homo sapien
tttcactgtaatagactgctggtatcagctggc

SEQ ID NO: 1060177 - DNA, 33 bp, Homo sapien
acagtcatggtgataacaactgctttaactggc

SEQ ID NO: 1060178 - DNA, 33 bp, Homo sapien
acagtcatggtgataagaactgctttaactggc

SEQ ID NO: 1060179 - DNA, 33 bp, Homo sapien
acctttgtccacgtgaaaatttacacacagaag

SEQ ID NO: 1060180 - DNA, 33 bp, Homo sapien
acctttgtccacgtgagaatttacacacagaag

SEQ ID NO: 1060181 - DNA, 33 bp, Homo sapien
gagcttttatatccaggattctctgcattcata

SEQ ID NO: 1060182 - DNA, 33 bp, Homo sapien
gagcttttatatccagtattctctgcattcata

SEQ ID NO: 1060183 - DNA, 33 bp, Homo sapien
tatgtcctagaccaaaatctacacagtatttca

SEQ ID NO: 1060184 - DNA, 33 bp, Homo sapien
tatgtcctagaccaaagtctacacagtatttca

SEQ ID NO: 1060185 - DNA, 33 bp, Homo sapien
tgtcgggcagagtccacggttcctatgaatgtg

SEQ ID NO: 1060186 - DNA, 33 bp, Homo sapien
tgtcgggcagagtccatggttcctatgaatgtg

SEQ ID NO: 1060187 - DNA, 33 bp, Homo sapien
ttgttgagtaaatgaaagaaagagacacgctct

SEQ ID NO: 1060188 - DNA, 33 bp, Homo sapien
ttgttgagtaaatgaatgaaagagacacgctct

SEQ ID NO: 1060189 - DNA, 33 bp, Homo sapien
aagtatacctgtattcacctcatatttggaaat

SEQ ID NO: 1060190 - DNA, 33 bp, Homo sapien
aagtatacctgtattcgcctcatatttggaaat

SEQ ID NO: 1060191 - DNA, 33 bp, Homo sapien
aaaatggcactatcagaagaatgggtaaattgt

SEQ ID NO: 1060192 - DNA, 33 bp, Homo sapien
aaaatggcactatcaggagaatgggtaaattgt

SEQ ID NO: 1060193 - DNA, 33 bp, Homo sapien
atggaggcctggcttagatctttcattccacct

SEQ ID NO: 1060194 - DNA, 33 bp, Homo sapien
atggaggcctggcttatatctttcattccacct

SEQ ID NO: 1060195 - DNA, 33 bp, Homo sapien
tttatttctccctctaacacagaaggatcttcc

SEQ ID NO: 1060196 - DNA, 33 bp, Homo sapien
tttatttctccctctagcacagaaggatcttcc

SEQ ID NO: 1060197 - DNA, 33 bp, Homo sapien
ggttatcacttcagaaaaatatagtatatatag

SEQ ID NO: 1060198 - DNA, 33 bp, Homo sapien
ggttatcacttcagaataatatagtatatatag

SEQ ID NO: 1060199 - DNA, 33 bp, Homo sapien
tttctgtctggctaaactccatttcctggtctt

SEQ ID NO: 1060200 - DNA, 33 bp, Homo sapien
tttctgtctggctaaattccatttcctggtctt

SEQ ID NO: 1060201 - DNA, 33 bp, Homo sapien
ataagagggtgtttgcaagagaaaggcctccag

SEQ ID NO: 1060202 - DNA, 33 bp, Homo sapien
ataagagggtgtttgcgagagaaaggcctccag

SEQ ID NO: 1060203 - DNA, 33 bp, Homo sapien
tgctttcaagttattaacaccactgatttctaa

SEQ ID NO: 1060204 - DNA, 33 bp, Homo sapien
tgctttcaagttattatcaccactgatttctaa

SEQ ID NO: 1060205 - DNA, 33 bp, Homo sapien
cagaaaagatttaagcagcaggtggttaaagtg

SEQ ID NO: 1060206 - DNA, 33 bp, Homo sapien
cagaaaagatttaagcggcaggtggttaaagtg

SEQ ID NO: 1060207 - DNA, 33 bp, Homo sapien
acatgaaagtttagccggataatgggataagaa

SEQ ID NO: 1060208 - DNA, 33 bp, Homo sapien
acatgaaagtttagcctgataatgggataagaa

SEQ ID NO: 1060209 - DNA, 33 bp, Homo sapien
ttctctaccaggctaaacattcccaattccctc

SEQ ID NO: 1060210 - DNA, 33 bp, Homo sapien
ttctctaccaggctaatcattcccaattccctc

SEQ ID NO: 1060211 - DNA, 33 bp, Homo sapien
atgcattttgaaataccatttggaaaccatcca

SEQ ID NO: 1060212 - DNA, 33 bp, Homo sapien
atgcattttgaaatacgatttggaaaccatcca

SEQ ID NO: 1060213 - DNA, 33 bp, Homo sapien
gtgatgccagtgttaacaaaacttactgaactg

SEQ ID NO: 1060214 - DNA, 33 bp, Homo sapien
gtgatgccagtgttaagaaaacttactgaactg

SEQ ID NO: 1060215 - DNA, 33 bp, Homo sapien
acaacatcgtctgatcacaatgcaaaaactaga

SEQ ID NO: 1060216 - DNA, 33 bp, Homo sapien
acaacatcgtctgatcgcaatgcaaaaactaga

SEQ ID NO: 1060217 - DNA, 33 bp, Homo sapien
atagccgtcctagtgaatataaattgatacctc

SEQ ID NO: 1060218 - DNA, 33 bp, Homo sapien
atagccgtcctagtgagtataaattgatacctc

SEQ ID NO: 1060219 - DNA, 33 bp, Homo sapien
actcctgctctaggaaaaaggtgtggttccttg

SEQ ID NO: 1060220 - DNA, 33 bp, Homo sapien
actcctgctctaggaagaaggtgtggttccttg

SEQ ID NO: 1060221 - DNA, 33 bp, Homo sapien
aataagaaagctgaaggcaccatactatgtgaa

SEQ ID NO: 1060222 - DNA, 33 bp, Homo sapien
aataagaaagctgaagtcaccatactatgtgaa

SEQ ID NO: 1060223 - DNA, 33 bp, Homo sapien
gttatacttctggaaacagagtaagttagatat

SEQ ID NO: 1060224 - DNA, 33 bp, Homo sapien
gttatacttctggaaatagagtaagttagatat

SEQ ID NO: 1060225 - DNA, 33 bp, Homo sapien
agtgacaaaatatcccaaggcattaagaaacac

SEQ ID NO: 1060226 - DNA, 33 bp, Homo sapien
agtgacaaaatatcccgaggcattaagaaacac

SEQ ID NO: 1060227 - DNA, 33 bp, Homo sapien
aaattcagtgattaataagcctagtcccccaca

SEQ ID NO: 1060228 - DNA, 33 bp, Homo sapien
aaattcagtgattaatgagcctagtcccccaca

SEQ ID NO: 1060229 - DNA, 33 bp, Homo sapien
aagtgatcctatatacagaagactctaaagact

SEQ ID NO: 1060230 - DNA, 33 bp, Homo sapien
aagtgatcctatatacggaagactctaaagact

SEQ ID NO: 1060231 - DNA, 33 bp, Homo sapien
taatgcaacttcctacactgtctacagaagcca

SEQ ID NO: 1060232 - DNA, 33 bp, Homo sapien
taatgcaacttcctacgctgtctacagaagcca

SEQ ID NO: 1060233 - DNA, 33 bp, Homo sapien
attattccttgccaaaagcatttccccaaaaaa

SEQ ID NO: 1060234 - DNA, 33 bp, Homo sapien
attattccttgccaaacgcatttccccaaaaaa

SEQ ID NO: 1060235 - DNA, 33 bp, Homo sapien
aatggcacttctgtacccttctgtggtgtgggg

SEQ ID NO: 1060236 - DNA, 33 bp, Homo sapien
aatggcacttctgtactcttctgtggtgtgggg

SEQ ID NO: 1060237 - DNA, 33 bp, Homo sapien
tgaagaacactataaacctactagacctaatag

SEQ ID NO: 1060238 - DNA, 33 bp, Homo sapien
tgaagaacactataaatctactagacctaatag

SEQ ID NO: 1060239 - DNA, 33 bp, Homo sapien
acatatctatcactagcaaaatgttgatgcaaa

SEQ ID NO: 1060240 - DNA, 33 bp, Homo sapien
acatatctatcactaggaaaatgttgatgcaaa

SEQ ID NO: 1060241 - DNA, 33 bp, Homo sapien
catgagtcaacgtgccaagccctgttctctttt

SEQ ID NO: 1060242 - DNA, 33 bp, Homo sapien
catgagtcaacgtgccgagccctgttctctttt

SEQ ID NO: 1060243 - DNA, 33 bp, Homo sapien
tagtcatatgcttgtaacactgtattggtttgc

SEQ ID NO: 1060244 - DNA, 33 bp, Homo sapien
tagtcatatgcttgtatcactgtattggtttgc

SEQ ID NO: 1060245 - DNA, 33 bp, Homo sapien
tcacccaagcagtatacaaggcatcgtatttgt

SEQ ID NO: 1060246 - DNA, 33 bp, Homo sapien
tcacccaagcagtatataaggcatcgtatttgt

SEQ ID NO: 1060247 - DNA, 33 bp, Homo sapien
atctaaagagaaaaatcatcagtcctaaatcta

SEQ ID NO: 1060248 - DNA, 33 bp, Homo sapien
atctaaagagaaaaatgatcagtcctaaatcta

SEQ ID NO: 1060249 - DNA, 33 bp, Homo sapien
aatacaaatcagtcagcctaacacaattcatta

SEQ ID NO: 1060250 - DNA, 33 bp, Homo sapien
aatacaaatcagtcagtctaacacaattcatta

SEQ ID NO: 1060251 - DNA, 33 bp, Homo sapien
tgttttccatacacaaccgccaagggaaaatgg

SEQ ID NO: 1060252 - DNA, 33 bp, Homo sapien
tgttttccatacacaatcgccaagggaaaatgg

SEQ ID NO: 1060253 - DNA, 33 bp, Homo sapien
ccagagcagaattttacgagccatgtaagtcga

SEQ ID NO: 1060254 - DNA, 33 bp, Homo sapien
ccagagcagaattttatgagccatgtaagtcga

SEQ ID NO: 1060255 - DNA, 33 bp, Homo sapien
aaaacatgatcttcccaaatgaactaaataagg

SEQ ID NO: 1060256 - DNA, 33 bp, Homo sapien
aaaacatgatcttcccgaatgaactaaataagg

SEQ ID NO: 1060257 - DNA, 33 bp, Homo sapien
atagcattgtcatctactaaatggtgggattta

SEQ ID NO: 1060258 - DNA, 33 bp, Homo sapien
atagcattgtcatctagtaaatggtgggattta

SEQ ID NO: 1060259 - DNA, 33 bp, Homo sapien
attacttcataaagaacgagcaccaaaaaagtc

SEQ ID NO: 1060260 - DNA, 33 bp, Homo sapien
attacttcataaagaatgagcaccaaaaaagtc

SEQ ID NO: 1060261 - DNA, 33 bp, Homo sapien
tcactctgttgaattacgttgagcctatagtta

SEQ ID NO: 1060262 - DNA, 33 bp, Homo sapien
tcactctgttgaattatgttgagcctatagtta

SEQ ID NO: 1060263 - DNA, 33 bp, Homo sapien
tagccccagaagttcacagagaagaggcagtcc

SEQ ID NO: 1060264 - DNA, 33 bp, Homo sapien
tagccccagaagttcatagagaagaggcagtcc

SEQ ID NO: 1060265 - DNA, 33 bp, Homo sapien
catggatgtgtgctggaattatacactttttca

SEQ ID NO: 1060266 - DNA, 33 bp, Homo sapien
catggatgtgtgctgggattatacactttttca

SEQ ID NO: 1060267 - DNA, 33 bp, Homo sapien
caataatgatctgaagacaacgaataaaaatgt

SEQ ID NO: 1060268 - DNA, 33 bp, Homo sapien
caataatgatctgaaggcaacgaataaaaatgt

SEQ ID NO: 1060269 - DNA, 33 bp, Homo sapien
tcctttctacccctcaatcttggtccactccct

SEQ ID NO: 1060270 - DNA, 33 bp, Homo sapien
tcctttctacccctcagtcttggtccactccct

SEQ ID NO: 1060271 - DNA, 33 bp, Homo sapien
gtaaatgaattcaggaagaaggtctcttaaacc

SEQ ID NO: 1060272 - DNA, 33 bp, Homo sapien
gtaaatgaattcaggaggaaggtctcttaaacc

SEQ ID NO: 1060273 - DNA, 33 bp, Homo sapien
aactatagagctgcaacgtgcccagcatgttat

SEQ ID NO: 1060274 - DNA, 33 bp, Homo sapien
aactatagagctgcaatgtgcccagcatgttat

SEQ ID NO: 1060275 - DNA, 33 bp, Homo sapien
caaaagctccctcagaatatgtgcctgagtctg

SEQ ID NO: 1060276 - DNA, 33 bp, Homo sapien
caaaagctccctcagagtatgtgcctgagtctg

SEQ ID NO: 1060277 - DNA, 33 bp, Homo sapien
aagttacagcaaagcaaactgaaaaaggcctat

SEQ ID NO: 1060278 - DNA, 33 bp, Homo sapien
aagttacagcaaagcagactgaaaaaggcctat

SEQ ID NO: 1060279 - DNA, 33 bp, Homo sapien
ctaggggaatctgaaacgatttcatggactagg

SEQ ID NO: 1060280 - DNA, 33 bp, Homo sapien
ctaggggaatctgaaatgatttcatggactagg

SEQ ID NO: 1060281 - DNA, 33 bp, Homo sapien
ctccacagcagagcaactggttgtggaagaagc

SEQ ID NO: 1060282 - DNA, 33 bp, Homo sapien
ctccacagcagagcaagtggttgtggaagaagc

SEQ ID NO: 1060283 - DNA, 33 bp, Homo sapien
atcataatatggtctgaaactttattaccagac

SEQ ID NO: 1060284 - DNA, 33 bp, Homo sapien
atcataatatggtctgcaactttattaccagac

SEQ ID NO: 1060285 - DNA, 33 bp, Homo sapien
caagaaaaagaaaaggcatccagaatgtaaagg

SEQ ID NO: 1060286 - DNA, 33 bp, Homo sapien
caagaaaaagaaaaggtatccagaatgtaaagg

SEQ ID NO: 1060287 - DNA, 33 bp, Homo sapien
acagaaacatttgagccagtttaagtagaggca

SEQ ID NO: 1060288 - DNA, 33 bp, Homo sapien
acagaaacatttgagctagtttaagtagaggca

SEQ ID NO: 1060289 - DNA, 33 bp, Homo sapien
tatgggaccatggggaaaatcggagaatgtttc

SEQ ID NO: 1060290 - DNA, 33 bp, Homo sapien
tatgggaccatggggacaatcggagaatgtttc

SEQ ID NO: 1060291 - DNA, 33 bp, Homo sapien
ttgttatcagctcagaatagtctgttataacca

SEQ ID NO: 1060292 - DNA, 33 bp, Homo sapien
ttgttatcagctcagagtagtctgttataacca

SEQ ID NO: 1060293 - DNA, 33 bp, Homo sapien
aaggactcagccctgaaagaattcatcacctgc

SEQ ID NO: 1060294 - DNA, 33 bp, Homo sapien
aaggactcagccctgacagaattcatcacctgc

SEQ ID NO: 1060295 - DNA, 33 bp, Homo sapien
ttgggaggcagatgcaaatggagtgcttgagtc

SEQ ID NO: 1060296 - DNA, 33 bp, Homo sapien
ttgggaggcagatgcagatggagtgcttgagtc

SEQ ID NO: 1060297 - DNA, 33 bp, Homo sapien
acaaaatggagactgaagagatgcagccttgaa

SEQ ID NO: 1060298 - DNA, 33 bp, Homo sapien
acaaaatggagactgaggagatgcagccttgaa

SEQ ID NO: 1060299 - DNA, 33 bp, Homo sapien
aggctgttaaatcccacgacaccagaaagtgcc

SEQ ID NO: 1060300 - DNA, 33 bp, Homo sapien
aggctgttaaatcccatgacaccagaaagtgcc

SEQ ID NO: 1060301 - DNA, 33 bp, Homo sapien
aatatatgactagataagcaagtctactcgact

SEQ ID NO: 1060302 - DNA, 33 bp, Homo sapien
aatatatgactagatatgcaagtctactcgact

SEQ ID NO: 1060303 - DNA, 33 bp, Homo sapien
gtttcctgacttaaatgattgtcattccaactt

SEQ ID NO: 1060304 - DNA, 33 bp, Homo sapien
gtttcctgacttaaattattgtcattccaactt

SEQ ID NO: 1060305 - DNA, 33 bp, Homo sapien
gagacagcaagtgtaaacaactctttccagaag

SEQ ID NO: 1060306 - DNA, 33 bp, Homo sapien
gagacagcaagtgtaagcaactctttccagaag

SEQ ID NO: 1060307 - DNA, 33 bp, Homo sapien
aaggatgggcaatggactaagaaaggtgcggat

SEQ ID NO: 1060308 - DNA, 33 bp, Homo sapien
aaggatgggcaatggagtaagaaaggtgcggat

SEQ ID NO: 1060309 - DNA, 33 bp, Homo sapien
atcttccttaagcacaactttcaccatgaattt

SEQ ID NO: 1060310 - DNA, 33 bp, Homo sapien
atcttccttaagcacagctttcaccatgaattt

SEQ ID NO: 1060311 - DNA, 33 bp, Homo sapien
caggaagaaggagcaaaggttttctgctcaggg

SEQ ID NO: 1060312 - DNA, 33 bp, Homo sapien
caggaagaaggagcaacggttttctgctcaggg

SEQ ID NO: 1060313 - DNA, 33 bp, Homo sapien
aactgggtaagtaaaagaatctggttggagcag

SEQ ID NO: 1060314 - DNA, 33 bp, Homo sapien
aactgggtaagtaaaataatctggttggagcag

SEQ ID NO: 1060315 - DNA, 33 bp, Homo sapien
actccatgtcaagcacagtagggggtacaacga

SEQ ID NO: 1060316 - DNA, 33 bp, Homo sapien
actccatgtcaagcactgtagggggtacaacga

SEQ ID NO: 1060317 - DNA, 33 bp, Homo sapien
gtccctggatcgtttgcaactaatttgtaactg

SEQ ID NO: 1060318 - DNA, 33 bp, Homo sapien
gtccctggatcgtttgtaactaatttgtaactg

SEQ ID NO: 1060319 - DNA, 33 bp, Homo sapien
ttttcagcatataagcgctatacatatcttgtt

SEQ ID NO: 1060320 - DNA, 33 bp, Homo sapien
ttttcagcatataagctctatacatatcttgtt

SEQ ID NO: 1060321 - DNA, 33 bp, Homo sapien
atattgcttgatccagaaaaaaatatatatata

SEQ ID NO: 1060322 - DNA, 33 bp, Homo sapien
atattgcttgatccaggaaaaaatatatatata

SEQ ID NO: 1060323 - DNA, 33 bp, Homo sapien
gtctgagttagtaagacagtatgtgtgtgtgag

SEQ ID NO: 1060324 - DNA, 33 bp, Homo sapien
gtctgagttagtaagagagtatgtgtgtgtgag

SEQ ID NO: 1060325 - DNA, 33 bp, Homo sapien
gaaacgcaaatgttccaaaccttgagactaaaa

SEQ ID NO: 1060326 - DNA, 33 bp, Homo sapien
gaaacgcaaatgttccgaaccttgagactaaaa

SEQ ID NO: 1060327 - DNA, 33 bp, Homo sapien
ttgatgagtagaaaggaatgagaaaaatttgag

SEQ ID NO: 1060328 - DNA, 33 bp, Homo sapien
ttgatgagtagaaagggatgagaaaaatttgag

SEQ ID NO: 1060329 - DNA, 33 bp, Homo sapien
tgcccctctgtgcacaactctagaacgcagtcc

SEQ ID NO: 1060330 - DNA, 33 bp, Homo sapien
tgcccctctgtgcacacctctagaacgcagtcc

SEQ ID NO: 1060331 - DNA, 33 bp, Homo sapien
aacctggcagtgcaataagtagcaggaacactg

SEQ ID NO: 1060332 - DNA, 33 bp, Homo sapien
aacctggcagtgcaatcagtagcaggaacactg

SEQ ID NO: 1060333 - DNA, 33 bp, Homo sapien
agagcctgagtgctcacgaggtgattatctgag

SEQ ID NO: 1060334 - DNA, 33 bp, Homo sapien
agagcctgagtgctcaggaggtgattatctgag

SEQ ID NO: 1060335 - DNA, 33 bp, Homo sapien
tccgtgtgctgctttacatggctaacttaaact

SEQ ID NO: 1060336 - DNA, 33 bp, Homo sapien
tccgtgtgctgctttatatggctaacttaaact

SEQ ID NO: 1060337 - DNA, 33 bp, Homo sapien
cttacagtccaggataaggcaaacagacagtca

SEQ ID NO: 1060338 - DNA, 33 bp, Homo sapien
cttacagtccaggatagggcaaacagacagtca

SEQ ID NO: 1060339 - DNA, 33 bp, Homo sapien
atgtaagtgacaaaccacagtagtgttagcggt

SEQ ID NO: 1060340 - DNA, 33 bp, Homo sapien
atgtaagtgacaaaccgcagtagtgttagcggt

SEQ ID NO: 1060341 - DNA, 33 bp, Homo sapien
tcactctgctcttgcaataacccctggatagct

SEQ ID NO: 1060342 - DNA, 33 bp, Homo sapien
tcactctgctcttgcagtaacccctggatagct

SEQ ID NO: 1060343 - DNA, 33 bp, Homo sapien
ttgagtgctcagttacaaaaagaggctcagaat

SEQ ID NO: 1060344 - DNA, 33 bp, Homo sapien
ttgagtgctcagttacgaaaagaggctcagaat

SEQ ID NO: 1060345 - DNA, 33 bp, Homo sapien
gataatgatactgacacggtggaattagcatga

SEQ ID NO: 1060346 - DNA, 33 bp, Homo sapien
gataatgatactgacatggtggaattagcatga

SEQ ID NO: 1060347 - DNA, 33 bp, Homo sapien
ctcttatgttgcaaagcctaaaagtgatgggtg

SEQ ID NO: 1060348 - DNA, 33 bp, Homo sapien
ctcttatgttgcaaagtctaaaagtgatgggtg

SEQ ID NO: 1060349 - DNA, 33 bp, Homo sapien
ttatctcagcactagaaatttagaggggagagt

SEQ ID NO: 1060350 - DNA, 33 bp, Homo sapien
ttatctcagcactagagatttagaggggagagt

SEQ ID NO: 1060351 - DNA, 33 bp, Homo sapien
tatgggactcacatagcataggccttgttactt

SEQ ID NO: 1060352 - DNA, 33 bp, Homo sapien
tatgggactcacatagtataggccttgttactt

SEQ ID NO: 1060353 - DNA, 33 bp, Homo sapien
ggccagtcctagtatgaagtcaagaggtggact

SEQ ID NO: 1060354 - DNA, 33 bp, Homo sapien
ggccagtcctagtatgcagtcaagaggtggact

SEQ ID NO: 1060355 - DNA, 33 bp, Homo sapien
ttcatggagtcaacaaaggggagtgagcagcca

SEQ ID NO: 1060356 - DNA, 33 bp, Homo sapien
ttcatggagtcaacaagggggagtgagcagcca

SEQ ID NO: 1060357 - DNA, 33 bp, Homo sapien
attcacatacattatccagagtacacagtgctg

SEQ ID NO: 1060358 - DNA, 33 bp, Homo sapien
attcacatacattatctagagtacacagtgctg

SEQ ID NO: 1060359 - DNA, 33 bp, Homo sapien
aagttaagagattggccacttctaaggataaat

SEQ ID NO: 1060360 - DNA, 33 bp, Homo sapien
aagttaagagattggctacttctaaggataaat

SEQ ID NO: 1060361 - DNA, 33 bp, Homo sapien
ttaatatgtgaaacaacttggacagatctcaaa

SEQ ID NO: 1060362 - DNA, 33 bp, Homo sapien
ttaatatgtgaaacaatttggacagatctcaaa

SEQ ID NO: 1060363 - DNA, 33 bp, Homo sapien
aggccaatgtgcctgaagaaaaagggtgagatt

SEQ ID NO: 1060364 - DNA, 33 bp, Homo sapien
aggccaatgtgcctgaggaaaaagggtgagatt

SEQ ID NO: 1060365 - DNA, 33 bp, Homo sapien
gatgggaacccaggcagtctgatgtcagagccc

SEQ ID NO: 1060366 - DNA, 33 bp, Homo sapien
gatgggaacccaggcattctgatgtcagagccc

SEQ ID NO: 1060367 - DNA, 33 bp, Homo sapien
agacagtatttggataccatagggctgccatca

SEQ ID NO: 1060368 - DNA, 33 bp, Homo sapien
agacagtatttggatatcatagggctgccatca

SEQ ID NO: 1060369 - DNA, 33 bp, Homo sapien
tggctaagtcatcatacctagctggattcaaaa

SEQ ID NO: 1060370 - DNA, 33 bp, Homo sapien
tggctaagtcatcatatctagctggattcaaaa

SEQ ID NO: 1060371 - DNA, 33 bp, Homo sapien
aagcactgatacttgacacaatacttagaaaca

SEQ ID NO: 1060372 - DNA, 33 bp, Homo sapien
aagcactgatacttgatacaatacttagaaaca

SEQ ID NO: 1060373 - DNA, 33 bp, Homo sapien
tagacactgttcttgccctaaatgtgaacacgc

SEQ ID NO: 1060374 - DNA, 33 bp, Homo sapien
tagacactgttcttgctctaaatgtgaacacgc

SEQ ID NO: 1060375 - DNA, 33 bp, Homo sapien
tgcagttggctttatacatcctgctctgttcct

SEQ ID NO: 1060376 - DNA, 33 bp, Homo sapien
tgcagttggctttatatatcctgctctgttcct

SEQ ID NO: 1060377 - DNA, 33 bp, Homo sapien
ttttataccccgccaaaatttctgacagagaac

SEQ ID NO: 1060378 - DNA, 33 bp, Homo sapien
ttttataccccgccaagatttctgacagagaac

SEQ ID NO: 1060379 - DNA, 33 bp, Homo sapien
ttggaggcctctaatacgtttaattaagcattt

SEQ ID NO: 1060380 - DNA, 33 bp, Homo sapien
ttggaggcctctaatatgtttaattaagcattt

SEQ ID NO: 1060381 - DNA, 33 bp, Homo sapien
gctttaagcaaatgaacatggtgcaaggatgat

SEQ ID NO: 1060382 - DNA, 33 bp, Homo sapien
gctttaagcaaatgaagatggtgcaaggatgat

SEQ ID NO: 1060383 - DNA, 33 bp, Homo sapien
attgatcatttgcataactgtatctccattcac

SEQ ID NO: 1060384 - DNA, 33 bp, Homo sapien
attgatcatttgcatagctgtatctccattcac

SEQ ID NO: 1060385 - DNA, 33 bp, Homo sapien
tggcgacagagccttgaagaattaagtgttggt

SEQ ID NO: 1060386 - DNA, 33 bp, Homo sapien
tggcgacagagccttgcagaattaagtgttggt

SEQ ID NO: 1060387 - DNA, 33 bp, Homo sapien
atctgggttcaaaatacggctttctcacttact

SEQ ID NO: 1060388 - DNA, 33 bp, Homo sapien
atctgggttcaaaatatggctttctcacttact

SEQ ID NO: 1060389 - DNA, 33 bp, Homo sapien
tttaagtaatataagaacagtcggaatcagatt

SEQ ID NO: 1060390 - DNA, 33 bp, Homo sapien
tttaagtaatataagaccagtcggaatcagatt

SEQ ID NO: 1060391 - DNA, 33 bp, Homo sapien
cattcatttgcttttgaacttttctacgtgtat

SEQ ID NO: 1060392 - DNA, 33 bp, Homo sapien
cattcatttgcttttggacttttctacgtgtat

SEQ ID NO: 1060393 - DNA, 33 bp, Homo sapien
tgggtacaagcttataagtattcctttctgcct

SEQ ID NO: 1060394 - DNA, 33 bp, Homo sapien
tgggtacaagcttataggtattcctttctgcct

SEQ ID NO: 1060395 - DNA, 33 bp, Homo sapien
ccttgcataactacaaccacaatcaagatacag

SEQ ID NO: 1060396 - DNA, 33 bp, Homo sapien
ccttgcataactacaatcacaatcaagatacag

SEQ ID NO: 1060397 - DNA, 33 bp, Homo sapien
accagtgacaatgatgcaattgacccagcacag

SEQ ID NO: 1060398 - DNA, 33 bp, Homo sapien
accagtgacaatgatgtaattgacccagcacag

SEQ ID NO: 1060399 - DNA, 33 bp, Homo sapien
tactgaattagaatccacatttaaacaagaatc

SEQ ID NO: 1060400 - DNA, 33 bp, Homo sapien
tactgaattagaatccgcatttaaacaagaatc

SEQ ID NO: 1060401 - DNA, 33 bp, Homo sapien
tcattgtcttcctaaacggtttctaattccttt

SEQ ID NO: 1060402 - DNA, 33 bp, Homo sapien
tcattgtcttcctaaatggtttctaattccttt

SEQ ID NO: 1060403 - DNA, 33 bp, Homo sapien
tatgtagtctggtttaactggtaacatggtaag

SEQ ID NO: 1060404 - DNA, 33 bp, Homo sapien
tatgtagtctggtttagctggtaacatggtaag

SEQ ID NO: 1060405 - DNA, 33 bp, Homo sapien
gaatgggtgatttctacagttctgtattcaact

SEQ ID NO: 1060406 - DNA, 33 bp, Homo sapien
gaatgggtgatttctatagttctgtattcaact

SEQ ID NO: 1060407 - DNA, 33 bp, Homo sapien
cctcctataccatagacgaaatacaagccatga

SEQ ID NO: 1060408 - DNA, 33 bp, Homo sapien
cctcctataccatagatgaaatacaagccatga

SEQ ID NO: 1060409 - DNA, 33 bp, Homo sapien
ataaaactgtatctgacctgaaaaatacattgg

SEQ ID NO: 1060410 - DNA, 33 bp, Homo sapien
ataaaactgtatctgagctgaaaaatacattgg

SEQ ID NO: 1060411 - DNA, 33 bp, Homo sapien
ccttacataaattctgaatcaatcttgccttaa

SEQ ID NO: 1060412 - DNA, 33 bp, Homo sapien
ccttacataaattctgtatcaatcttgccttaa

SEQ ID NO: 1060413 - DNA, 33 bp, Homo sapien
atttcttctgcatagaccttccccactcccctt

SEQ ID NO: 1060414 - DNA, 33 bp, Homo sapien
atttcttctgcatagatcttccccactcccctt

SEQ ID NO: 1060415 - DNA, 33 bp, Homo sapien
attaatagctctttccaccaaattccccaggac

SEQ ID NO: 1060416 - DNA, 33 bp, Homo sapien
attaatagctctttccgccaaattccccaggac

SEQ ID NO: 1060417 - DNA, 33 bp, Homo sapien
tcgtgacaaattggaaccctttcctctctaaaa

SEQ ID NO: 1060418 - DNA, 33 bp, Homo sapien
tcgtgacaaattggaatcctttcctctctaaaa

SEQ ID NO: 1060419 - DNA, 33 bp, Homo sapien
tccttcaggggtgataaaggcagttttggcagg

SEQ ID NO: 1060420 - DNA, 33 bp, Homo sapien
tccttcaggggtgatagaggcagttttggcagg

SEQ ID NO: 1060421 - DNA, 33 bp, Homo sapien
agcaatgctgtacacaagctagacctaacaaca

SEQ ID NO: 1060422 - DNA, 33 bp, Homo sapien
agcaatgctgtacacaggctagacctaacaaca

SEQ ID NO: 1060423 - DNA, 33 bp, Homo sapien
aaggcagagaaacatcactccatagccactacc

SEQ ID NO: 1060424 - DNA, 33 bp, Homo sapien
aaggcagagaaacatcgctccatagccactacc

SEQ ID NO: 1060425 - DNA, 33 bp, Homo sapien
acttgattagtgaagccgctagtataaaaataa

SEQ ID NO: 1060426 - DNA, 33 bp, Homo sapien
acttgattagtgaagctgctagtataaaaataa

SEQ ID NO: 1060427 - DNA, 33 bp, Homo sapien
ctaattggaaacaaaagaatgcaaccatttgtc

SEQ ID NO: 1060428 - DNA, 33 bp, Homo sapien
ctaattggaaacaaaataatgcaaccatttgtc

SEQ ID NO: 1060429 - DNA, 33 bp, Homo sapien
agagaagaaataatcaacaaaatcgaagctaga

SEQ ID NO: 1060430 - DNA, 33 bp, Homo sapien
agagaagaaataatcagcaaaatcgaagctaga

SEQ ID NO: 1060431 - DNA, 33 bp, Homo sapien
atccagaatttgtgagccattgaactcagtgat

SEQ ID NO: 1060432 - DNA, 33 bp, Homo sapien
atccagaatttgtgaggcattgaactcagtgat

SEQ ID NO: 1060433 - DNA, 33 bp, Homo sapien
caagagatatacacataagcaaaccggaacaat

SEQ ID NO: 1060434 - DNA, 33 bp, Homo sapien
caagagatatacacatgagcaaaccggaacaat

SEQ ID NO: 1060435 - DNA, 33 bp, Homo sapien
gaagttttgagtaacacgccaaaaagacagagg

SEQ ID NO: 1060436 - DNA, 33 bp, Homo sapien
gaagttttgagtaacatgccaaaaagacagagg

SEQ ID NO: 1060437 - DNA, 33 bp, Homo sapien
taccttactttattgacgaggactctaggatct

SEQ ID NO: 1060438 - DNA, 33 bp, Homo sapien
taccttactttattgatgaggactctaggatct

SEQ ID NO: 1060439 - DNA, 33 bp, Homo sapien
gacttgtctctcacaagttggggaaataatctt

SEQ ID NO: 1060440 - DNA, 33 bp, Homo sapien
gacttgtctctcacaatttggggaaataatctt

SEQ ID NO: 1060441 - DNA, 33 bp, Homo sapien
tgtcccagggcaccacagggacttgtctctcac

SEQ ID NO: 1060442 - DNA, 33 bp, Homo sapien
tgtcccagggcaccacggggacttgtctctcac

SEQ ID NO: 1060443 - DNA, 33 bp, Homo sapien
tcagcaatggctttatcaaaagctgtccttgta

SEQ ID NO: 1060444 - DNA, 33 bp, Homo sapien
tcagcaatggctttatgaaaagctgtccttgta

SEQ ID NO: 1060445 - DNA, 33 bp, Homo sapien
tgagactgtcctgcaaaaaggtgtggccatgct

SEQ ID NO: 1060446 - DNA, 33 bp, Homo sapien
tgagactgtcctgcaagaaggtgtggccatgct

SEQ ID NO: 1060447 - DNA, 33 bp, Homo sapien
atgctgttctccataaagctgtagtagtttaca

SEQ ID NO: 1060448 - DNA, 33 bp, Homo sapien
atgctgttctccataatgctgtagtagtttaca

SEQ ID NO: 1060449 - DNA, 33 bp, Homo sapien
tctgtcttttaattggaatgtttagtgcattta

SEQ ID NO: 1060450 - DNA, 33 bp, Homo sapien
tctgtcttttaattgggatgtttagtgcattta

SEQ ID NO: 1060451 - DNA, 33 bp, Homo sapien
ataaaacaagcaaccaataacaccactgctgcc

SEQ ID NO: 1060452 - DNA, 33 bp, Homo sapien
ataaaacaagcaaccagtaacaccactgctgcc

SEQ ID NO: 1060453 - DNA, 33 bp, Homo sapien
ccaaaatcacaagacaatatctttctcttccct

SEQ ID NO: 1060454 - DNA, 33 bp, Homo sapien
ccaaaatcacaagacagtatctttctcttccct

SEQ ID NO: 1060455 - DNA, 33 bp, Homo sapien
ttgacatgaaaataggaaagtttattatccaca

SEQ ID NO: 1060456 - DNA, 33 bp, Homo sapien
ttgacatgaaaataggcaagtttattatccaca

SEQ ID NO: 1060457 - DNA, 33 bp, Homo sapien
gcagtgtataatgttacgtgaaggtagaatcca

SEQ ID NO: 1060458 - DNA, 33 bp, Homo sapien
gcagtgtataatgttatgtgaaggtagaatcca

SEQ ID NO: 1060459 - DNA, 33 bp, Homo sapien
ttccagtgcttttatacggcactaattataacc

SEQ ID NO: 1060460 - DNA, 33 bp, Homo sapien
ttccagtgcttttatatggcactaattataacc

SEQ ID NO: 1060461 - DNA, 33 bp, Homo sapien
aacctcctgtagtacaacaccatttcttggcat

SEQ ID NO: 1060462 - DNA, 33 bp, Homo sapien
aacctcctgtagtacaccaccatttcttggcat

SEQ ID NO: 1060463 - DNA, 33 bp, Homo sapien
gaggtataggttcttaggaccatcactacagtc

SEQ ID NO: 1060464 - DNA, 33 bp, Homo sapien
gaggtataggttcttatgaccatcactacagtc

SEQ ID NO: 1060465 - DNA, 33 bp, Homo sapien
acatactttctccttcaaatgtttgatactctt

SEQ ID NO: 1060466 - DNA, 33 bp, Homo sapien
acatactttctccttcgaatgtttgatactctt

SEQ ID NO: 1060467 - DNA, 33 bp, Homo sapien
gctttaacactgtttacgaatgactctggtaaa

SEQ ID NO: 1060468 - DNA, 33 bp, Homo sapien
gctttaacactgtttatgaatgactctggtaaa

SEQ ID NO: 1060469 - DNA, 33 bp, Homo sapien
aataagccaggcagacaacaatacagataaaag

SEQ ID NO: 1060470 - DNA, 33 bp, Homo sapien
aataagccaggcagacgacaatacagataaaag

SEQ ID NO: 1060471 - DNA, 33 bp, Homo sapien
ttttatggaaaatttcccaattgtttgctattt

SEQ ID NO: 1060472 - DNA, 33 bp, Homo sapien
ttttatggaaaatttctcaattgtttgctattt

SEQ ID NO: 1060473 - DNA, 33 bp, Homo sapien
catatactagtgttaacgttcaatcctgtaagt

SEQ ID NO: 1060474 - DNA, 33 bp, Homo sapien
catatactagtgttaatgttcaatcctgtaagt

SEQ ID NO: 1060475 - DNA, 33 bp, Homo sapien
aaaggagtctgtgatgccactattctatttgaa

SEQ ID NO: 1060476 - DNA, 33 bp, Homo sapien
aaaggagtctgtgatgtcactattctatttgaa

SEQ ID NO: 1060477 - DNA, 33 bp, Homo sapien
cagtctaatgccataaaccaaacctttaaaact

SEQ ID NO: 1060478 - DNA, 33 bp, Homo sapien
cagtctaatgccataagccaaacctttaaaact

SEQ ID NO: 1060479 - DNA, 33 bp, Homo sapien
tacaacagacttgaaacagttttgaggaaaact

SEQ ID NO: 1060480 - DNA, 33 bp, Homo sapien
tacaacagacttgaaatagttttgaggaaaact

SEQ ID NO: 1060481 - DNA, 33 bp, Homo sapien
ggaagctttgggatgagaagaacagaagttcag

SEQ ID NO: 1060482 - DNA, 33 bp, Homo sapien
ggaagctttgggatgataagaacagaagttcag

SEQ ID NO: 1060483 - DNA, 33 bp, Homo sapien
ccaagaaacccaagagaagtcatgcctacacca

SEQ ID NO: 1060484 - DNA, 33 bp, Homo sapien
ccaagaaacccaagaggagtcatgcctacacca

SEQ ID NO: 1060485 - DNA, 33 bp, Homo sapien
agttttacattctactcaacaacctactgttag

SEQ ID NO: 1060486 - DNA, 33 bp, Homo sapien
agttttacattctacttaacaacctactgttag

SEQ ID NO: 1060487 - DNA, 33 bp, Homo sapien
taaattgttaatgtcaacttattctcaatcaat

SEQ ID NO: 1060488 - DNA, 33 bp, Homo sapien
taaattgttaatgtcagcttattctcaatcaat

SEQ ID NO: 1060489 - DNA, 33 bp, Homo sapien
atatgttttatctttacagcctaactgtcccct

SEQ ID NO: 1060490 - DNA, 33 bp, Homo sapien
atatgttttatctttatagcctaactgtcccct

SEQ ID NO: 1060491 - DNA, 33 bp, Homo sapien
tggaataaaaaatgtacagttgtaggtgctact

SEQ ID NO: 1060492 - DNA, 33 bp, Homo sapien
tggaataaaaaatgtatagttgtaggtgctact

SEQ ID NO: 1060493 - DNA, 33 bp, Homo sapien
tcctattttgaaagccaattatgaagaagctag

SEQ ID NO: 1060494 - DNA, 33 bp, Homo sapien
tcctattttgaaagccgattatgaagaagctag

SEQ ID NO: 1060495 - DNA, 33 bp, Homo sapien
atatattcgggtgccaataggtacttggtataa

SEQ ID NO: 1060496 - DNA, 33 bp, Homo sapien
atatattcgggtgccagtaggtacttggtataa

SEQ ID NO: 1060497 - DNA, 33 bp, Homo sapien
ctatgtgtagatttacaaagcctacagttctat

SEQ ID NO: 1060498 - DNA, 33 bp, Homo sapien
ctatgtgtagatttacgaagcctacagttctat

SEQ ID NO: 1060499 - DNA, 33 bp, Homo sapien
ggtatctcaagactaaaggccggaatctggagg

SEQ ID NO: 1060500 - DNA, 33 bp, Homo sapien
ggtatctcaagactaacggccggaatctggagg

SEQ ID NO: 1060501 - DNA, 33 bp, Homo sapien
cacaccatactatacaataccatgcaaagtgct

SEQ ID NO: 1060502 - DNA, 33 bp, Homo sapien
cacaccatactatacagtaccatgcaaagtgct

SEQ ID NO: 1060503 - DNA, 33 bp, Homo sapien
ttgtggtcacttacaactgtgcacctagactct

SEQ ID NO: 1060504 - DNA, 33 bp, Homo sapien
ttgtggtcacttacaattgtgcacctagactct

SEQ ID NO: 1060505 - DNA, 33 bp, Homo sapien
tctctacttgaccagtaaagacacatatggact

SEQ ID NO: 1060506 - DNA, 33 bp, Homo sapien
tctctacttgaccagtgaagacacatatggact

SEQ ID NO: 1060507 - DNA, 33 bp, Homo sapien
aaccaggagcatggaacgtctttttatttgtgt

SEQ ID NO: 1060508 - DNA, 33 bp, Homo sapien
aaccaggagcatggaatgtctttttatttgtgt

SEQ ID NO: 1060509 - DNA, 33 bp, Homo sapien
gctgatttcacagctagaatttattttcatatt

SEQ ID NO: 1060510 - DNA, 33 bp, Homo sapien
gctgatttcacagctataatttattttcatatt

SEQ ID NO: 1060511 - DNA, 33 bp, Homo sapien
tactcctctgagattacggtacaacaggaccct

SEQ ID NO: 1060512 - DNA, 33 bp, Homo sapien
tactcctctgagattatggtacaacaggaccct

SEQ ID NO: 1060513 - DNA, 33 bp, Homo sapien
ttgcccgtaagcagcacgttctggcttgtaggt

SEQ ID NO: 1060514 - DNA, 33 bp, Homo sapien
ttgcccgtaagcagcatgttctggcttgtaggt

SEQ ID NO: 1060515 - DNA, 33 bp, Homo sapien
aaacaatgcttatcaccggcttactgttaataa

SEQ ID NO: 1060516 - DNA, 33 bp, Homo sapien
aaacaatgcttatcactggcttactgttaataa

SEQ ID NO: 1060517 - DNA, 33 bp, Homo sapien
cacgtaaatggaataacacaatagatgcctttt

SEQ ID NO: 1060518 - DNA, 33 bp, Homo sapien
cacgtaaatggaataatacaatagatgcctttt

SEQ ID NO: 1060519 - DNA, 33 bp, Homo sapien
gacagctagcaagagacgagttacacagaaatg

SEQ ID NO: 1060520 - DNA, 33 bp, Homo sapien
gacagctagcaagagaggagttacacagaaatg

SEQ ID NO: 1060521 - DNA, 33 bp, Homo sapien
agcgccttacagtgaaccatttaacatgagaaa

SEQ ID NO: 1060522 - DNA, 33 bp, Homo sapien
agcgccttacagtgaatcatttaacatgagaaa

SEQ ID NO: 1060523 - DNA, 33 bp, Homo sapien
aaaagcatgtgaaataccaatacttgtaagttt

SEQ ID NO: 1060524 - DNA, 33 bp, Homo sapien
aaaagcatgtgaaatatcaatacttgtaagttt

SEQ ID NO: 1060525 - DNA, 33 bp, Homo sapien
agtggtcatacagagcgcattcttgtagcaata

SEQ ID NO: 1060526 - DNA, 33 bp, Homo sapien
agtggtcatacagagctcattcttgtagcaata

SEQ ID NO: 1060527 - DNA, 33 bp, Homo sapien
gactgctttccactaaatgtcagtggtgacccc

SEQ ID NO: 1060528 - DNA, 33 bp, Homo sapien
gactgctttccactaagtgtcagtggtgacccc

SEQ ID NO: 1060529 - DNA, 33 bp, Homo sapien
acaatggtttgataaccaggtgcaggatgctga

SEQ ID NO: 1060530 - DNA, 33 bp, Homo sapien
acaatggtttgataactaggtgcaggatgctga

SEQ ID NO: 1060531 - DNA, 33 bp, Homo sapien
gctgagtacttgggaaatccaagggtagaaggt

SEQ ID NO: 1060532 - DNA, 33 bp, Homo sapien
gctgagtacttgggaagtccaagggtagaaggt

SEQ ID NO: 1060533 - DNA, 33 bp, Homo sapien
gctgaaactggcaaaaagtcttcaacagctcgt

SEQ ID NO: 1060534 - DNA, 33 bp, Homo sapien
gctgaaactggcaaaaggtcttcaacagctcgt

SEQ ID NO: 1060535 - DNA, 33 bp, Homo sapien
cacaggacagcctggcggattttctcgagtatc

SEQ ID NO: 1060536 - DNA, 33 bp, Homo sapien
cacaggacagcctggctgattttctcgagtatc

SEQ ID NO: 1060537 - DNA, 33 bp, Homo sapien
tagccagggagccagcaatcagcaatgccagag

SEQ ID NO: 1060538 - DNA, 33 bp, Homo sapien
tagccagggagccagccatcagcaatgccagag

SEQ ID NO: 1060539 - DNA, 33 bp, Homo sapien
tgagggaagcctttagaaagggggcagtaaagg

SEQ ID NO: 1060540 - DNA, 33 bp, Homo sapien
tgagggaagcctttaggaagggggcagtaaagg

SEQ ID NO: 1060541 - DNA, 33 bp, Homo sapien
agtctcagaggaagtacacagaaagaaaggaac

SEQ ID NO: 1060542 - DNA, 33 bp, Homo sapien
agtctcagaggaagtagacagaaagaaaggaac

SEQ ID NO: 1060543 - DNA, 33 bp, Homo sapien
aacaacctaacattgcgcatcaacaaactagaa

SEQ ID NO: 1060544 - DNA, 33 bp, Homo sapien
aacaacctaacattgctcatcaacaaactagaa

SEQ ID NO: 1060545 - DNA, 33 bp, Homo sapien
aatgcaaagagggctggaaatattgtttctttc

SEQ ID NO: 1060546 - DNA, 33 bp, Homo sapien
aatgcaaagagggctgtaaatattgtttctttc

SEQ ID NO: 1060547 - DNA, 33 bp, Homo sapien
cttttcttccaaggaaagtttatcagcaacaaa

SEQ ID NO: 1060548 - DNA, 33 bp, Homo sapien
cttttcttccaaggaaggtttatcagcaacaaa

SEQ ID NO: 1060549 - DNA, 33 bp, Homo sapien
agatgaaatgaactaagtccttgtacaacacaa

SEQ ID NO: 1060550 - DNA, 33 bp, Homo sapien
agatgaaatgaactaattccttgtacaacacaa

SEQ ID NO: 1060551 - DNA, 33 bp, Homo sapien
agcacagagctatagactctactcacagaaaga

SEQ ID NO: 1060552 - DNA, 33 bp, Homo sapien
agcacagagctatagagtctactcacagaaaga

SEQ ID NO: 1060553 - DNA, 33 bp, Homo sapien
catgaaggaacaactcccaggggctgtctcaat

SEQ ID NO: 1060554 - DNA, 33 bp, Homo sapien
catgaaggaacaactctcaggggctgtctcaat

SEQ ID NO: 1060555 - DNA, 33 bp, Homo sapien
tgtgtttcaccctgcccaattgtgcagggctgt

SEQ ID NO: 1060556 - DNA, 33 bp, Homo sapien
tgtgtttcaccctgcctaattgtgcagggctgt

SEQ ID NO: 1060557 - DNA, 33 bp, Homo sapien
catattgaaatacttacggatccaatgacgtgt

SEQ ID NO: 1060558 - DNA, 33 bp, Homo sapien
catattgaaatacttatggatccaatgacgtgt

SEQ ID NO: 1060559 - DNA, 33 bp, Homo sapien
aggtgctcaagaaccaacctgtgctgcaggctg

SEQ ID NO: 1060560 - DNA, 33 bp, Homo sapien
aggtgctcaagaaccatcctgtgctgcaggctg

SEQ ID NO: 1060561 - DNA, 33 bp, Homo sapien
gatgtgtcttggcatacagttctttgagtttat

SEQ ID NO: 1060562 - DNA, 33 bp, Homo sapien
gatgtgtcttggcatagagttctttgagtttat

SEQ ID NO: 1060563 - DNA, 33 bp, Homo sapien
taatgccatctgaggaaatctttttgttgggag

SEQ ID NO: 1060564 - DNA, 33 bp, Homo sapien
taatgccatctgaggacatctttttgttgggag

SEQ ID NO: 1060565 - DNA, 33 bp, Homo sapien
ctaggagctttctgaacgctatggtttagggac

SEQ ID NO: 1060566 - DNA, 33 bp, Homo sapien
ctaggagctttctgaatgctatggtttagggac

SEQ ID NO: 1060567 - DNA, 33 bp, Homo sapien
caccttgcctctctaccacatttccacctggtc

SEQ ID NO: 1060568 - DNA, 33 bp, Homo sapien
caccttgcctctctactacatttccacctggtc

SEQ ID NO: 1060569 - DNA, 33 bp, Homo sapien
agagacaatctcctgaaggtccacagctgtcac

SEQ ID NO: 1060570 - DNA, 33 bp, Homo sapien
agagacaatctcctgatggtccacagctgtcac

SEQ ID NO: 1060571 - DNA, 33 bp, Homo sapien
tcggctgaaatggacaaacttgattggtatgac

SEQ ID NO: 1060572 - DNA, 33 bp, Homo sapien
tcggctgaaatggacagacttgattggtatgac

SEQ ID NO: 1060573 - DNA, 33 bp, Homo sapien
agcaggtaactgggtaaggcttcttttgcttcc

SEQ ID NO: 1060574 - DNA, 33 bp, Homo sapien
agcaggtaactgggtagggcttcttttgcttcc

SEQ ID NO: 1060575 - DNA, 33 bp, Homo sapien
atggcatactgtactcaaaatctgaagacctgc

SEQ ID NO: 1060576 - DNA, 33 bp, Homo sapien
atggcatactgtactcgaaatctgaagacctgc

SEQ ID NO: 1060577 - DNA, 33 bp, Homo sapien
atagaatgagcctacaaaaatttatttaaccag

SEQ ID NO: 1060578 - DNA, 33 bp, Homo sapien
atagaatgagcctacagaaatttatttaaccag

SEQ ID NO: 1060579 - DNA, 33 bp, Homo sapien
caggtttgagctgaaagaggaaataatcagtga

SEQ ID NO: 1060580 - DNA, 33 bp, Homo sapien
caggtttgagctgaaataggaaataatcagtga

SEQ ID NO: 1060581 - DNA, 33 bp, Homo sapien
ttcagtaaagttgcagaatatgctatcaacatg

SEQ ID NO: 1060582 - DNA, 33 bp, Homo sapien
ttcagtaaagttgcaggatatgctatcaacatg

SEQ ID NO: 1060583 - DNA, 33 bp, Homo sapien
atttttacattgcacacaaaataaaatggcttg

SEQ ID NO: 1060584 - DNA, 33 bp, Homo sapien
atttttacattgcacagaaaataaaatggcttg

SEQ ID NO: 1060585 - DNA, 33 bp, Homo sapien
agctcttctgggctcacgtatctccttgcccct

SEQ ID NO: 1060586 - DNA, 33 bp, Homo sapien
agctcttctgggctcatgtatctccttgcccct

SEQ ID NO: 1060587 - DNA, 33 bp, Homo sapien
tttagtaactaaagacaaagcatgttcctattc

SEQ ID NO: 1060588 - DNA, 33 bp, Homo sapien
tttagtaactaaagacgaagcatgttcctattc

SEQ ID NO: 1060589 - DNA, 33 bp, Homo sapien
atacacttatgccttcacacattttattctctt

SEQ ID NO: 1060590 - DNA, 33 bp, Homo sapien
atacacttatgccttcgcacattttattctctt

SEQ ID NO: 1060591 - DNA, 33 bp, Homo sapien
cagggttacctccctcaactgagagaatgcagg

SEQ ID NO: 1060592 - DNA, 33 bp, Homo sapien
cagggttacctccctccactgagagaatgcagg

SEQ ID NO: 1060593 - DNA, 33 bp, Homo sapien
gtggatgcagtgaacaatattattcaggaatca

SEQ ID NO: 1060594 - DNA, 33 bp, Homo sapien
gtggatgcagtgaacattattattcaggaatca

SEQ ID NO: 1060595 - DNA, 33 bp, Homo sapien
tcatcttcagcatacaagccctgaatggagcat

SEQ ID NO: 1060596 - DNA, 33 bp, Homo sapien
tcatcttcagcatacaggccctgaatggagcat

SEQ ID NO: 1060597 - DNA, 33 bp, Homo sapien
caacaacagcataaggaatcacatagttccaaa

SEQ ID NO: 1060598 - DNA, 33 bp, Homo sapien
caacaacagcataaggtatcacatagttccaaa

SEQ ID NO: 1060599 - DNA, 33 bp, Homo sapien
aatggatgctctcaaaggcactgtttaaaccag

SEQ ID NO: 1060600 - DNA, 33 bp, Homo sapien
aatggatgctctcaaatgcactgtttaaaccag

SEQ ID NO: 1060601 - DNA, 33 bp, Homo sapien
tttctagtcttttctaccacggagatttatggg

SEQ ID NO: 1060602 - DNA, 33 bp, Homo sapien
tttctagtcttttctatcacggagatttatggg

SEQ ID NO: 1060603 - DNA, 33 bp, Homo sapien
tttataattcattcaggaattattgaacacctc

SEQ ID NO: 1060604 - DNA, 33 bp, Homo sapien
tttataattcattcagtaattattgaacacctc

SEQ ID NO: 1060605 - DNA, 33 bp, Homo sapien
gacacacgcacgaagaaatgattcgttgtttat

SEQ ID NO: 1060606 - DNA, 33 bp, Homo sapien
gacacacgcacgaagagatgattcgttgtttat

SEQ ID NO: 1060607 - DNA, 33 bp, Homo sapien
tcccacttccaaaacaactcggaagctcctttg

SEQ ID NO: 1060608 - DNA, 33 bp, Homo sapien
tcccacttccaaaacatctcggaagctcctttg

SEQ ID NO: 1060609 - DNA, 33 bp, Homo sapien
agatgaagtataaatgaaggtagattctgccct

SEQ ID NO: 1060610 - DNA, 33 bp, Homo sapien
agatgaagtataaatggaggtagattctgccct

SEQ ID NO: 1060611 - DNA, 33 bp, Homo sapien
ccaaggtaactgtggaatactcaaaactttgcc

SEQ ID NO: 1060612 - DNA, 33 bp, Homo sapien
ccaaggtaactgtggagtactcaaaactttgcc

SEQ ID NO: 1060613 - DNA, 33 bp, Homo sapien
ttttacgttatttactaaaccaaatcataattt

SEQ ID NO: 1060614 - DNA, 33 bp, Homo sapien
ttttacgttatttactgaaccaaatcataattt

SEQ ID NO: 1060615 - DNA, 33 bp, Homo sapien
atcctaggtctgccaactgaatgaggacattaa

SEQ ID NO: 1060616 - DNA, 33 bp, Homo sapien
atcctaggtctgccaattgaatgaggacattaa

SEQ ID NO: 1060617 - DNA, 33 bp, Homo sapien
gtgctctcttgcaatcactatctcttggctgga

SEQ ID NO: 1060618 - DNA, 33 bp, Homo sapien
gtgctctcttgcaatcgctatctcttggctgga

SEQ ID NO: 1060619 - DNA, 33 bp, Homo sapien
cctatctctaatagaccacttagcagattctgg

SEQ ID NO: 1060620 - DNA, 33 bp, Homo sapien
cctatctctaatagactacttagcagattctgg

SEQ ID NO: 1060621 - DNA, 33 bp, Homo sapien
cactgcatcaaaaggacctgatgtatatacaca

SEQ ID NO: 1060622 - DNA, 33 bp, Homo sapien
cactgcatcaaaaggatctgatgtatatacaca

SEQ ID NO: 1060623 - DNA, 33 bp, Homo sapien
ctgggcaggtttagaacgctctttagcttaggc

SEQ ID NO: 1060624 - DNA, 33 bp, Homo sapien
ctgggcaggtttagaatgctctttagcttaggc

SEQ ID NO: 1060625 - DNA, 33 bp, Homo sapien
ccttgttgtttgaagaaaggactttatatagta

SEQ ID NO: 1060626 - DNA, 33 bp, Homo sapien
ccttgttgtttgaagagaggactttatatagta

SEQ ID NO: 1060627 - DNA, 33 bp, Homo sapien
tatagccgttgctaaggatatcagagagatggg

SEQ ID NO: 1060628 - DNA, 33 bp, Homo sapien
tatagccgttgctaagtatatcagagagatggg

SEQ ID NO: 1060629 - DNA, 33 bp, Homo sapien
aataagtgcactcgaaagtgaccctgtgctaca

SEQ ID NO: 1060630 - DNA, 33 bp, Homo sapien
aataagtgcactcgaatgtgaccctgtgctaca

SEQ ID NO: 1060631 - DNA, 33 bp, Homo sapien
acaatctacattttaagtctacttcttcataat

SEQ ID NO: 1060632 - DNA, 33 bp, Homo sapien
acaatctacattttaattctacttcttcataat

SEQ ID NO: 1060633 - DNA, 33 bp, Homo sapien
tcttatcacatagaaaataagagttgtacaaat

SEQ ID NO: 1060634 - DNA, 33 bp, Homo sapien
tcttatcacatagaaagtaagagttgtacaaat

SEQ ID NO: 1060635 - DNA, 33 bp, Homo sapien
atgcaaactgtattaacggcttagctactactg

SEQ ID NO: 1060636 - DNA, 33 bp, Homo sapien
atgcaaactgtattaatggcttagctactactg

SEQ ID NO: 1060637 - DNA, 33 bp, Homo sapien
gagtaaataaccttaacggaatgtttgggtgtc

SEQ ID NO: 1060638 - DNA, 33 bp, Homo sapien
gagtaaataaccttaatggaatgtttgggtgtc

SEQ ID NO: 1060639 - DNA, 33 bp, Homo sapien
gaaatgaggcctaggaatcctactctcataaaa

SEQ ID NO: 1060640 - DNA, 33 bp, Homo sapien
gaaatgaggcctaggattcctactctcataaaa

SEQ ID NO: 1060641 - DNA, 33 bp, Homo sapien
ggttgtgtggctctcacgaagaggaacagaagg

SEQ ID NO: 1060642 - DNA, 33 bp, Homo sapien
ggttgtgtggctctcatgaagaggaacagaagg

SEQ ID NO: 1060643 - DNA, 33 bp, Homo sapien
tagtaacatgcttttccctaaaactagatttcc

SEQ ID NO: 1060644 - DNA, 33 bp, Homo sapien
tagtaacatgcttttctctaaaactagatttcc

SEQ ID NO: 1060645 - DNA, 33 bp, Homo sapien
tgtattgaaaatgtcacggtgatgtatgtaaga

SEQ ID NO: 1060646 - DNA, 33 bp, Homo sapien
tgtattgaaaatgtcatggtgatgtatgtaaga

SEQ ID NO: 1060647 - DNA, 33 bp, Homo sapien
ctttagcaattgagcagagtaatgaaatacagc

SEQ ID NO: 1060648 - DNA, 33 bp, Homo sapien
ctttagcaattgagcatagtaatgaaatacagc

SEQ ID NO: 1060649 - DNA, 33 bp, Homo sapien
aaggcaaatgcaacacaaacaaagataaattga

SEQ ID NO: 1060650 - DNA, 33 bp, Homo sapien
aaggcaaatgcaacaccaacaaagataaattga

SEQ ID NO: 1060651 - DNA, 33 bp, Homo sapien
tataataagaatcaagccctaacagatccctaa

SEQ ID NO: 1060652 - DNA, 33 bp, Homo sapien
tataataagaatcaagtcctaacagatccctaa

SEQ ID NO: 1060653 - DNA, 33 bp, Homo sapien
gctgctatgatagaagcactccaatgtaatcaa

SEQ ID NO: 1060654 - DNA, 33 bp, Homo sapien
gctgctatgatagaaggactccaatgtaatcaa

SEQ ID NO: 1060655 - DNA, 33 bp, Homo sapien
aaaagctatttcacaaaaggatatccaaatggc

SEQ ID NO: 1060656 - DNA, 33 bp, Homo sapien
aaaagctatttcacaagaggatatccaaatggc

SEQ ID NO: 1060657 - DNA, 33 bp, Homo sapien
actttaactggaggaccgtaatgacatttttgc

SEQ ID NO: 1060658 - DNA, 33 bp, Homo sapien
actttaactggaggactgtaatgacatttttgc

SEQ ID NO: 1060659 - DNA, 33 bp, Homo sapien
tgcaacagctggaaaaaataaaatgaaatacat

SEQ ID NO: 1060660 - DNA, 33 bp, Homo sapien
tgcaacagctggaaaagataaaatgaaatacat

SEQ ID NO: 1060661 - DNA, 33 bp, Homo sapien
agttctggagctgtgaccggtgagagtacatga

SEQ ID NO: 1060662 - DNA, 33 bp, Homo sapien
agttctggagctgtgagcggtgagagtacatga

SEQ ID NO: 1060663 - DNA, 33 bp, Homo sapien
gtgcactcttctagagccagtaacacaacacct

SEQ ID NO: 1060664 - DNA, 33 bp, Homo sapien
gtgcactcttctagagtcagtaacacaacacct

SEQ ID NO: 1060665 - DNA, 33 bp, Homo sapien
agccttccttgagttggaataaacttcaatcaa

SEQ ID NO: 1060666 - DNA, 33 bp, Homo sapien
agccttccttgagttgtaataaacttcaatcaa

SEQ ID NO: 1060667 - DNA, 33 bp, Homo sapien
gtatctgtatttcttaagcaacagtgcccctag

SEQ ID NO: 1060668 - DNA, 33 bp, Homo sapien
gtatctgtatttcttaggcaacagtgcccctag

SEQ ID NO: 1060669 - DNA, 33 bp, Homo sapien
tttattgtgaactcataatatctctgtatcctc

SEQ ID NO: 1060670 - DNA, 33 bp, Homo sapien
tttattgtgaactcatgatatctctgtatcctc

SEQ ID NO: 1060671 - DNA, 33 bp, Homo sapien
tgggagcaggaaggaaatgagtatagctgtaga

SEQ ID NO: 1060672 - DNA, 33 bp, Homo sapien
tgggagcaggaaggaagtgagtatagctgtaga

SEQ ID NO: 1060673 - DNA, 33 bp, Homo sapien
gtacagctattacatacccagaataattgttta

SEQ ID NO: 1060674 - DNA, 33 bp, Homo sapien
gtacagctattacatatccagaataattgttta

SEQ ID NO: 1060675 - DNA, 33 bp, Homo sapien
ctcaatggtgaaagacacattcctataagatca

SEQ ID NO: 1060676 - DNA, 33 bp, Homo sapien
ctcaatggtgaaagactcattcctataagatca

SEQ ID NO: 1060677 - DNA, 33 bp, Homo sapien
atttctgctctatgaaagatacttgagaaaaaa

SEQ ID NO: 1060678 - DNA, 33 bp, Homo sapien
atttctgctctatgaaggatacttgagaaaaaa

SEQ ID NO: 1060679 - DNA, 33 bp, Homo sapien
gcaaggggaacattacccatctcacaggcacga

SEQ ID NO: 1060680 - DNA, 33 bp, Homo sapien
gcaaggggaacattactcatctcacaggcacga

SEQ ID NO: 1060681 - DNA, 33 bp, Homo sapien
atctcttctgtttggcaaccttagccattcttg

SEQ ID NO: 1060682 - DNA, 33 bp, Homo sapien
atctcttctgtttggccaccttagccattcttg

SEQ ID NO: 1060683 - DNA, 33 bp, Homo sapien
cagaaaatttgaggggaattattggacaggccc

SEQ ID NO: 1060684 - DNA, 33 bp, Homo sapien
cagaaaatttgagggggattattggacaggccc

SEQ ID NO: 1060685 - DNA, 33 bp, Homo sapien
taacaggtttacttcaaaaagcaatgaattaaa

SEQ ID NO: 1060686 - DNA, 33 bp, Homo sapien
taacaggtttacttcacaaagcaatgaattaaa

SEQ ID NO: 1060687 - DNA, 33 bp, Homo sapien
gcacatttttttattaactccacaatttttcaa

SEQ ID NO: 1060688 - DNA, 33 bp, Homo sapien
gcacatttttttattatctccacaatttttcaa

SEQ ID NO: 1060689 - DNA, 33 bp, Homo sapien
ctgtcctttcctctcccctagcagaataaatgg

SEQ ID NO: 1060690 - DNA, 33 bp, Homo sapien
ctgtcctttcctctcctctagcagaataaatgg

SEQ ID NO: 1060691 - DNA, 33 bp, Homo sapien
gattctatatgaattggaagatgaatttttcta

SEQ ID NO: 1060692 - DNA, 33 bp, Homo sapien
gattctatatgaattgtaagatgaatttttcta

SEQ ID NO: 1060693 - DNA, 33 bp, Homo sapien
aactatcacaggtctccagcacaactgacttga

SEQ ID NO: 1060694 - DNA, 33 bp, Homo sapien
aactatcacaggtctctagcacaactgacttga

SEQ ID NO: 1060695 - DNA, 33 bp, Homo sapien
ccagttagaacggcagccattaaaaagtcagga

SEQ ID NO: 1060696 - DNA, 33 bp, Homo sapien
ccagttagaacggcagtcattaaaaagtcagga

SEQ ID NO: 1060697 - DNA, 33 bp, Homo sapien
tagtactacaaagtcaaaaaaacaactggtgtt

SEQ ID NO: 1060698 - DNA, 33 bp, Homo sapien
tagtactacaaagtcataaaaacaactggtgtt

SEQ ID NO: 1060699 - DNA, 33 bp, Homo sapien
attcatgagcatgggacggttttccattggttt

SEQ ID NO: 1060700 - DNA, 33 bp, Homo sapien
attcatgagcatgggatggttttccattggttt

SEQ ID NO: 1060701 - DNA, 33 bp, Homo sapien
tgtggctacagtaggccattttcccctgccact

SEQ ID NO: 1060702 - DNA, 33 bp, Homo sapien
tgtggctacagtaggctattttcccctgccact

SEQ ID NO: 1060703 - DNA, 33 bp, Homo sapien
gctatgagggcgcaaaagcataagaataatacc

SEQ ID NO: 1060704 - DNA, 33 bp, Homo sapien
gctatgagggcgcaaaggcataagaataatacc

SEQ ID NO: 1060705 - DNA, 33 bp, Homo sapien
ctatgaattagggtcaaaaatggtttccttcta

SEQ ID NO: 1060706 - DNA, 33 bp, Homo sapien
ctatgaattagggtcagaaatggtttccttcta

SEQ ID NO: 1060707 - DNA, 33 bp, Homo sapien
cgcttcattctttctcactctcaaacaatttct

SEQ ID NO: 1060708 - DNA, 33 bp, Homo sapien
cgcttcattctttctcgctctcaaacaatttct

SEQ ID NO: 1060709 - DNA, 33 bp, Homo sapien
aagatcaagaaagaggacatctggttaccacat

SEQ ID NO: 1060710 - DNA, 33 bp, Homo sapien
aagatcaagaaagaggccatctggttaccacat

SEQ ID NO: 1060711 - DNA, 33 bp, Homo sapien
ctggctggaagacaccggccctggctgtaaaac

SEQ ID NO: 1060712 - DNA, 33 bp, Homo sapien
ctggctggaagacacctgccctggctgtaaaac

SEQ ID NO: 1060713 - DNA, 33 bp, Homo sapien
gtggtgacttaccttacatcacaaaaatagaat

SEQ ID NO: 1060714 - DNA, 33 bp, Homo sapien
gtggtgacttaccttagatcacaaaaatagaat

SEQ ID NO: 1060715 - DNA, 33 bp, Homo sapien
aacaagtatccagtgacggaccttaatgacatg

SEQ ID NO: 1060716 - DNA, 33 bp, Homo sapien
aacaagtatccagtgatggaccttaatgacatg

SEQ ID NO: 1060717 - DNA, 33 bp, Homo sapien
tggcagccatcccttcacatcacttagaatcac

SEQ ID NO: 1060718 - DNA, 33 bp, Homo sapien
tggcagccatcccttcgcatcacttagaatcac

SEQ ID NO: 1060719 - DNA, 33 bp, Homo sapien
gaactcagcgtaaagaacaacatcttgtttata

SEQ ID NO: 1060720 - DNA, 33 bp, Homo sapien
gaactcagcgtaaagagcaacatcttgtttata

SEQ ID NO: 1060721 - DNA, 33 bp, Homo sapien
tgatgtcacgacttcaaattagatgatttctac

SEQ ID NO: 1060722 - DNA, 33 bp, Homo sapien
tgatgtcacgacttcagattagatgatttctac

SEQ ID NO: 1060723 - DNA, 33 bp, Homo sapien; identical to SEQ ID NO: 1060721

SEQ ID NO: 1060724 - DNA, 33 bp, Homo sapien; identical to SEQ ID NO: 1060722

SEQ ID NO: 1060725 - DNA, 33 bp, Homo sapien
tacccgttcatgagcaaaggatgtgtttccgtt

SEQ ID NO: 1060726 - DNA, 33 bp, Homo sapien
tacccgttcatgagcataggatgtgtttccgtt

SEQ ID NO: 1060727 - DNA, 33 bp, Homo sapien
aattcaaggatgcagaaattcacaaaactaaag

SEQ ID NO: 1060728 - DNA, 33 bp, Homo sapien
aattcaaggatgcagacattcacaaaactaaag

SEQ ID NO: 1060729 - DNA, 33 bp, Homo sapien
tgaatcgaagggatataagagccaacttagctc

SEQ ID NO: 1060730 - DNA, 33 bp, Homo sapien
tgaatcgaagggatatgagagccaacttagctc

SEQ ID NO: 1060731 - DNA, 33 bp, Homo sapien
aaaagcaatggcaaaaaaagtaaaaattgacaa

SEQ ID NO: 1060732 - DNA, 33 bp, Homo sapien
aaaagcaatggcaaaataagtaaaaattgacaa

SEQ ID NO: 1060733 - DNA, 33 bp, Homo sapien
cttgccaaaatggccactcgggcacacagagaa

SEQ ID NO: 1060734 - DNA, 33 bp, Homo sapien
cttgccaaaatggccagtcgggcacacagagaa

SEQ ID NO: 1060735 - DNA, 33 bp, Homo sapien
aaatgcaagtcaaaaacgagataccatctcatg

SEQ ID NO: 1060736 - DNA, 33 bp, Homo sapien
aaatgcaagtcaaaaatgagataccatctcatg

SEQ ID NO: 1060737 - DNA, 33 bp, Homo sapien
aagaacgaggttataccaaaaaatgtaggctgc

SEQ ID NO: 1060738 - DNA, 33 bp, Homo sapien
aagaacgaggttatactaaaaaatgtaggctgc

SEQ ID NO: 1060739 - DNA, 33 bp, Homo sapien
ccaggtagaaacaaaaagagcttccaataaaat

SEQ ID NO: 1060740 - DNA, 33 bp, Homo sapien
ccaggtagaaacaaaaggagcttccaataaaat

SEQ ID NO: 1060741 - DNA, 33 bp, Homo sapien
atgaatggattaatgacaatacattcaaagcat

SEQ ID NO: 1060742 - DNA, 33 bp, Homo sapien
atgaatggattaatgagaatacattcaaagcat

SEQ ID NO: 1060743 - DNA, 33 bp, Homo sapien
cctcaaagagacctgaaattgataagagagggc

SEQ ID NO: 1060744 - DNA, 33 bp, Homo sapien
cctcaaagagacctgagattgataagagagggc

SEQ ID NO: 1060745 - DNA, 33 bp, Homo sapien
ccctaagtatgcacaaagttgaagggacaactt

SEQ ID NO: 1060746 - DNA, 33 bp, Homo sapien
ccctaagtatgcacaaggttgaagggacaactt

SEQ ID NO: 1060747 - DNA, 33 bp, Homo sapien
tgacctggcattcttcactcctttgcagcctga

SEQ ID NO: 1060748 - DNA, 33 bp, Homo sapien
tgacctggcattcttcgctcctttgcagcctga

SEQ ID NO: 1060749 - DNA, 33 bp, Homo sapien
atttacctttatggacaataggattcttattaa

SEQ ID NO: 1060750 - DNA, 33 bp, Homo sapien
atttacctttatggacgataggattcttattaa

SEQ ID NO: 1060751 - DNA, 33 bp, Homo sapien
ttgtttaaaattgccaaagcatgatgaaaattt

SEQ ID NO: 1060752 - DNA, 33 bp, Homo sapien
ttgtttaaaattgccagagcatgatgaaaattt

SEQ ID NO: 1060753 - DNA, 33 bp, Homo sapien
tctttcatcattgtcgaatagttttgggtgtag

SEQ ID NO: 1060754 - DNA, 33 bp, Homo sapien
tctttcatcattgtcgtatagttttgggtgtag

SEQ ID NO: 1060755 - DNA, 33 bp, Homo sapien
catggtccaaaaaatgccaaaccaattaattca

SEQ ID NO: 1060756 - DNA, 33 bp, Homo sapien
catggtccaaaaaatgtcaaaccaattaattca

SEQ ID NO: 1060757 - DNA, 33 bp, Homo sapien
tagtctctggggcacccatgtatttgtcggaag

SEQ ID NO: 1060758 - DNA, 33 bp, Homo sapien
tagtctctggggcaccgatgtatttgtcggaag

SEQ ID NO: 1060759 - DNA, 33 bp, Homo sapien
ataggcactgtcaaacgaaagtctctaaaagat

SEQ ID NO: 1060760 - DNA, 33 bp, Homo sapien
ataggcactgtcaaactaaagtctctaaaagat

SEQ ID NO: 1060761 - DNA, 33 bp, Homo sapien
gctcagatatgaagtgaacttggctaggtcata

SEQ ID NO: 1060762 - DNA, 33 bp, Homo sapien
gctcagatatgaagtggacttggctaggtcata

SEQ ID NO: 1060763 - DNA, 33 bp, Homo sapien
cacttattatcctagaagaagaagttgtataat

SEQ ID NO: 1060764 - DNA, 33 bp, Homo sapien
cacttattatcctagaggaagaagttgtataat

SEQ ID NO: 1060765 - DNA, 33 bp, Homo sapien
gtaggtaccttttcaacgaacctagacccagtt

SEQ ID NO: 1060766 - DNA, 33 bp, Homo sapien
gtaggtaccttttcaatgaacctagacccagtt

SEQ ID NO: 1060767 - DNA, 33 bp, Homo sapien
agattaactaattttgaaagaagctctacagta

SEQ ID NO: 1060768 - DNA, 33 bp, Homo sapien
agattaactaattttgtaagaagctctacagta

SEQ ID NO: 1060769 - DNA, 33 bp, Homo sapien
agtaaataaaatgctaccaaataccaaggcatg

SEQ ID NO: 1060770 - DNA, 33 bp, Homo sapien
agtaaataaaatgctatcaaataccaaggcatg

SEQ ID NO: 1060771 - DNA, 33 bp, Homo sapien
tgtgtctctggtagacagcaactagtagatata

SEQ ID NO: 1060772 - DNA, 33 bp, Homo sapien
tgtgtctctggtagactgcaactagtagatata

SEQ ID NO: 1060773 - DNA, 33 bp, Homo sapien
atgttgactttagataaattgatgactatgtgc

SEQ ID NO: 1060774 - DNA, 33 bp, Homo sapien
atgttgactttagatagattgatgactatgtgc

SEQ ID NO: 1060775 - DNA, 33 bp, Homo sapien
aattattctgtttaaggaggctcaagatagaac

SEQ ID NO: 1060776 - DNA, 33 bp, Homo sapien
aattattctgtttaagtaggctcaagatagaac

SEQ ID NO: 1060777 - DNA, 33 bp, Homo sapien
ggttagaaacccttgcagcaaaatagtgcaggt

SEQ ID NO: 1060778 - DNA, 33 bp, Homo sapien
ggttagaaacccttgctgcaaaatagtgcaggt

SEQ ID NO: 1060779 - DNA, 33 bp, Homo sapien
attccagagtaagtggaccacagtgaggggaaa

SEQ ID NO: 1060780 - DNA, 33 bp, Homo sapien
attccagagtaagtggtccacagtgaggggaaa

SEQ ID NO: 1060781 - DNA, 33 bp, Homo sapien
acctggaactactcccaacacccagaaggtgga

SEQ ID NO: 1060782 - DNA, 33 bp, Homo sapien
acctggaactactcccgacacccagaaggtgga

SEQ ID NO: 1060783 - DNA, 33 bp, Homo sapien
cttagatccaaccagaaaaagccaagtatgcac

SEQ ID NO: 1060784 - DNA, 33 bp, Homo sapien
cttagatccaaccagagaaagccaagtatgcac

SEQ ID NO: 1060785 - DNA, 33 bp, Homo sapien
aatacagaacttaagaagtaaatgaagctctat

SEQ ID NO: 1060786 - DNA, 33 bp, Homo sapien
aatacagaacttaagaggtaaatgaagctctat

SEQ ID NO: 1060787 - DNA, 33 bp, Homo sapien
ttataaacaaattcagcaaagtcggaggataca

SEQ ID NO: 1060788 - DNA, 33 bp, Homo sapien
ttataaacaaattcagtaaagtcggaggataca

SEQ ID NO: 1060789 - DNA, 33 bp, Homo sapien
aatatactgaattggacaaaaacttaaaaactc

SEQ ID NO: 1060790 - DNA, 33 bp, Homo sapien
aatatactgaattggagaaaaacttaaaaactc

SEQ ID NO: 1060791 - DNA, 33 bp, Homo sapien
actagatgcaaacctacagaaccaccaccctac

SEQ ID NO: 1060792 - DNA, 33 bp, Homo sapien
actagatgcaaacctatagaaccaccaccctac

SEQ ID NO: 1060793 - DNA, 33 bp, Homo sapien
agacattccgaggtcaacatgaaaaaaatctta

SEQ ID NO: 1060794 - DNA, 33 bp, Homo sapien
agacattccgaggtcagcatgaaaaaaatctta

SEQ ID NO: 1060795 - DNA, 33 bp, Homo sapien
actttttaataatagcaattcttggccagacat

SEQ ID NO: 1060796 - DNA, 33 bp, Homo sapien
actttttaataatagcgattcttggccagacat

SEQ ID NO: 1060797 - DNA, 33 bp, Homo sapien
caaatctcgaggcataacattaccagatttcaa

SEQ ID NO: 1060798 - DNA, 33 bp, Homo sapien
caaatctcgaggcatagcattaccagatttcaa

SEQ ID NO: 1060799 - DNA, 33 bp, Homo sapien
ggtgtccctaggaaaacgttgcatccccctata

SEQ ID NO: 1060800 - DNA, 33 bp, Homo sapien
ggtgtccctaggaaaaggttgcatccccctata

SEQ ID NO: 1060801 - DNA, 33 bp, Homo sapien
cccagaattgaacttacagtgtaatgaaaaaaa

SEQ ID NO: 1060802 - DNA, 33 bp, Homo sapien
cccagaattgaacttatagtgtaatgaaaaaaa

SEQ ID NO: 1060803 - DNA, 33 bp, Homo sapien
actgtaaggaaacagcagagtcagacaacttga

SEQ ID NO: 1060804 - DNA, 33 bp, Homo sapien
actgtaaggaaacagcggagtcagacaacttga

SEQ ID NO: 1060805 - DNA, 33 bp, Homo sapien
gacttcaaacgatactataaggcactagttact

SEQ ID NO: 1060806 - DNA, 33 bp, Homo sapien
gacttcaaacgatactgtaaggcactagttact

SEQ ID NO: 1060807 - DNA, 33 bp, Homo sapien
gtgaaagcagctggaaatagaattgtaccatgc

SEQ ID NO: 1060808 - DNA, 33 bp, Homo sapien
gtgaaagcagctggaagtagaattgtaccatgc

SEQ ID NO: 1060809 - DNA, 33 bp, Homo sapien
tagattaaacaagtacacgaaattgcaaaatgg

SEQ ID NO: 1060810 - DNA, 33 bp, Homo sapien
tagattaaacaagtacccgaaattgcaaaatgg

SEQ ID NO: 1060811 - DNA, 33 bp, Homo sapien
tattaggccttaaaacacagctcaacatatttt

SEQ ID NO: 1060812 - DNA, 33 bp, Homo sapien
tattaggccttaaaacgcagctcaacatatttt

SEQ ID NO: 1060813 - DNA, 33 bp, Homo sapien
aaagtataataaaaaaccaaagttgcgttcaga

SEQ ID NO: 1060814 - DNA, 33 bp, Homo sapien
aaagtataataaaaaagcaaagttgcgttcaga

SEQ ID NO: 1060815 - DNA, 33 bp, Homo sapien
tgctgagaaaactcaccacccatatgtagaaag

SEQ ID NO: 1060816 - DNA, 33 bp, Homo sapien
tgctgagaaaactcactacccatatgtagaaag

SEQ ID NO: 1060817 - DNA, 33 bp, Homo sapien
ccaaaacataggacaacagttggaaagaaggag

SEQ ID NO: 1060818 - DNA, 33 bp, Homo sapien
ccaaaacataggacaagagttggaaagaaggag

SEQ ID NO: 1060819 - DNA, 33 bp, Homo sapien
atttaatgtaagctaaatgatacagggatgttc

SEQ ID NO: 1060820 - DNA, 33 bp, Homo sapien
atttaatgtaagctaactgatacagggatgttc

SEQ ID NO: 1060821 - DNA, 33 bp, Homo sapien
aaaattactcttctcccagccaagaaaacctat

SEQ ID NO: 1060822 - DNA, 33 bp, Homo sapien
aaaattactcttctcctagccaagaaaacctat

SEQ ID NO: 1060823 - DNA, 33 bp, Homo sapien
tcttctgcagctttctcaacactcaccaccttc

SEQ ID NO: 1060824 - DNA, 33 bp, Homo sapien
tcttctgcagctttcttaacactcaccaccttc

SEQ ID NO: 1060825 - DNA, 33 bp, Homo sapien
gcccactgtttatctgaaattgtttcctgggat

SEQ ID NO: 1060826 - DNA, 33 bp, Homo sapien
gcccactgtttatctggaattgtttcctgggat

SEQ ID NO: 1060827 - DNA, 33 bp, Homo sapien
ttgtggttgtattagacaattatgggttgctat

SEQ ID NO: 1060828 - DNA, 33 bp, Homo sapien
ttgtggttgtattagataattatgggttgctat

SEQ ID NO: 1060829 - DNA, 33 bp, Homo sapien
aagtattgagctcataatagagaggagaattgt

SEQ ID NO: 1060830 - DNA, 33 bp, Homo sapien
aagtattgagctcatagtagagaggagaattgt

SEQ ID NO: 1060831 - DNA, 33 bp, Homo sapien
gatgcattctgggccactatttaagtgatattt

SEQ ID NO: 1060832 - DNA, 33 bp, Homo sapien
gatgcattctgggccattatttaagtgatattt

SEQ ID NO: 1060833 - DNA, 33 bp, Homo sapien
ttctgcaccaattaaaagcacaggaagactgag

SEQ ID NO: 1060834 - DNA, 33 bp, Homo sapien
ttctgcaccaattaaaggcacaggaagactgag

SEQ ID NO: 1060835 - DNA, 33 bp, Homo sapien
tatgtagggagaattacgaacagataagaacag

SEQ ID NO: 1060836 - DNA, 33 bp, Homo sapien
tatgtagggagaattatgaacagataagaacag

SEQ ID NO: 1060837 - DNA, 33 bp, Homo sapien
gaaagcaagttgtatacaatatggaatgatatt

SEQ ID NO: 1060838 - DNA, 33 bp, Homo sapien
gaaagcaagttgtatataatatggaatgatatt

SEQ ID NO: 1060839 - DNA, 33 bp, Homo sapien
gtagaatacgtgtaggccaagattctggatatt

SEQ ID NO: 1060840 - DNA, 33 bp, Homo sapien
gtagaatacgtgtaggtcaagattctggatatt

SEQ ID NO: 1060841 - DNA, 33 bp, Homo sapien
gaaatgatttattcaaagcactggaagaaaaac

SEQ ID NO: 1060842 - DNA, 33 bp, Homo sapien
gaaatgatttattcaacgcactggaagaaaaac

SEQ ID NO: 1060843 - DNA, 33 bp, Homo sapien
tgtagagctatttataaattgttgagggttaga

SEQ ID NO: 1060844 - DNA, 33 bp, Homo sapien
tgtagagctatttatatattgttgagggttaga

SEQ ID NO: 1060845 - DNA, 33 bp, Homo sapien
aggcaaaaggcttgtacagacatttatcaaaag

SEQ ID NO: 1060846 - DNA, 33 bp, Homo sapien
aggcaaaaggcttgtatagacatttatcaaaag

SEQ ID NO: 1060847 - DNA, 33 bp, Homo sapien
caatcccattgtttgacgtatacccaaaggaat

SEQ ID NO: 1060848 - DNA, 33 bp, Homo sapien
caatcccattgtttgatgtatacccaaaggaat

SEQ ID NO: 1060849 - DNA, 33 bp, Homo sapien; identical to SEQ ID NO: 1060847

SEQ ID NO: 1060850 - DNA, 33 bp, Homo sapien; identical to SEQ ID NO: 1060848

SEQ ID NO: 1060851 - DNA, 33 bp, Homo sapien
aagtaataaccttacaatggtctccaagagttc

SEQ ID NO: 1060852 - DNA, 33 bp, Homo sapien
aagtaataaccttacagtggtctccaagagttc

SEQ ID NO: 1060853 - DNA, 33 bp, Homo sapien
cctgcaccttcaagaagtagctagtgtctattg

SEQ ID NO: 1060854 - DNA, 33 bp, Homo sapien
cctgcaccttcaagaattagctagtgtctattg

SEQ ID NO: 1060855 - DNA, 33 bp, Homo sapien
actttccattaattcacagtgaagccgaaaagc

SEQ ID NO: 1060856 - DNA, 33 bp, Homo sapien
actttccattaattcagagtgaagccgaaaagc

SEQ ID NO: 1060857 - DNA, 33 bp, Homo sapien
tctcagaaaataggcactctataggggatttta

SEQ ID NO: 1060858 - DNA, 33 bp, Homo sapien
tctcagaaaataggcattctataggggatttta

SEQ ID NO: 1060859 - DNA, 33 bp, Homo sapien
agccagtaatgggttaaactattggacataggt

SEQ ID NO: 1060860 - DNA, 33 bp, Homo sapien
agccagtaatgggttagactattggacataggt

SEQ ID NO: 1060861 - DNA, 33 bp, Homo sapien
aaaggatcattagtgactaccataaccaactat

SEQ ID NO: 1060862 - DNA, 33 bp, Homo sapien
aaaggatcattagtgattaccataaccaactat

SEQ ID NO: 1060863 - DNA, 33 bp, Homo sapien
tgctgaattttactggaatgtgcctcttagtgg

SEQ ID NO: 1060864 - DNA, 33 bp, Homo sapien
tgctgaattttactgggatgtgcctcttagtgg

SEQ ID NO: 1060865 - DNA, 33 bp, Homo sapien
aactgaatcactttcacggcaatgtattagaag

SEQ ID NO: 1060866 - DNA, 33 bp, Homo sapien
aactgaatcactttcatggcaatgtattagaag

SEQ ID NO: 1060867 - DNA, 33 bp, Homo sapien
acaaactatgcttaagacaaaggggtaatatcc

SEQ ID NO: 1060868 - DNA, 33 bp, Homo sapien
acaaactatgcttaaggcaaaggggtaatatcc

SEQ ID NO: 1060869 - DNA, 33 bp, Homo sapien
cagtcttctggactaaacaagtcagatggaaat

SEQ ID NO: 1060870 - DNA, 33 bp, Homo sapien
cagtcttctggactaaccaagtcagatggaaat

SEQ ID NO: 1060871 - DNA, 33 bp, Homo sapien
ctcaccttttgccatgcaatacatacctcttct

SEQ ID NO: 1060872 - DNA, 33 bp, Homo sapien
ctcaccttttgccatgtaatacatacctcttct

SEQ ID NO: 1060873 - DNA, 33 bp, Homo sapien
gttagtcacttcacaaatacattgaggatatag

SEQ ID NO: 1060874 - DNA, 33 bp, Homo sapien
gttagtcacttcacaagtacattgaggatatag

SEQ ID NO: 1060875 - DNA, 33 bp, Homo sapien
atgggaggttgaacaactattcatgaacaaaag

SEQ ID NO: 1060876 - DNA, 33 bp, Homo sapien
atgggaggttgaacaattattcatgaacaaaag

SEQ ID NO: 1060877 - DNA, 33 bp, Homo sapien
gtttgattttctagacagagtctcacattgtta

SEQ ID NO: 1060878 - DNA, 33 bp, Homo sapien
gtttgattttctagacggagtctcacattgtta

SEQ ID NO: 1060879 - DNA, 33 bp, Homo sapien
agctgcagatcttatgaaacatagaaaaactat

SEQ ID NO: 1060880 - DNA, 33 bp, Homo sapien
agctgcagatcttatgcaacatagaaaaactat

SEQ ID NO: 1060881 - DNA, 33 bp, Homo sapien
acttcaaactatgctacaaggttacagtaacca

SEQ ID NO: 1060882 - DNA, 33 bp, Homo sapien
acttcaaactatgctataaggttacagtaacca

SEQ ID NO: 1060883 - DNA, 33 bp, Homo sapien
ttcacagtagcagaaacataggaccaacgtagg

SEQ ID NO: 1060884 - DNA, 33 bp, Homo sapien
ttcacagtagcagaaagataggaccaacgtagg

SEQ ID NO: 1060885 - DNA, 33 bp, Homo sapien
cttgccttaaataaaactaaactcttctcctaa

SEQ ID NO: 1060886 - DNA, 33 bp, Homo sapien
cttgccttaaataaaagtaaactcttctcctaa

SEQ ID NO: 1060887 - DNA, 33 bp, Homo sapien
tatattcctgaataccaaaatttcaagtaaatt

SEQ ID NO: 1060888 - DNA, 33 bp, Homo sapien
tatattcctgaatacccaaatttcaagtaaatt

SEQ ID NO: 1060889 - DNA, 33 bp, Homo sapien
tgattgactaatgtaaatggaccatctcaggaa

SEQ ID NO: 1060890 - DNA, 33 bp, Homo sapien
tgattgactaatgtaactggaccatctcaggaa

SEQ ID NO: 1060891 - DNA, 33 bp, Homo sapien
cacttaagctcttaaaacagatggtcattctct

SEQ ID NO: 1060892 - DNA, 33 bp, Homo sapien
cacttaagctcttaaatcagatggtcattctct

SEQ ID NO: 1060893 - DNA, 33 bp, Homo sapien
atagaagattagaatgcaataggaagccagagc

SEQ ID NO: 1060894 - DNA, 33 bp, Homo sapien
atagaagattagaatggaataggaagccagagc

SEQ ID NO: 1060895 - DNA, 33 bp, Homo sapien
gtatatagtttgaataccttggagttaaagagg

SEQ ID NO: 1060896 - DNA, 33 bp, Homo sapien
gtatatagtttgaatatcttggagttaaagagg

SEQ ID NO: 1060897 - DNA, 33 bp, Homo sapien
cataatcaccagctaacagcatgatgacaaggt

SEQ ID NO: 1060898 - DNA, 33 bp, Homo sapien
cataatcaccagctaagagcatgatgacaaggt

SEQ ID NO: 1060899 - DNA, 33 bp, Homo sapien
ctgcaagtggatggggaaagtagctatcttgaa

SEQ ID NO: 1060900 - DNA, 33 bp, Homo sapien
ctgcaagtggatgggggaagtagctatcttgaa

SEQ ID NO: 1060901 - DNA, 33 bp, Homo sapien
agatggaccatgggaacatttttagatgtgtta

SEQ ID NO: 1060902 - DNA, 33 bp, Homo sapien
agatggaccatgggaatatttttagatgtgtta

SEQ ID NO: 1060903 - DNA, 33 bp, Homo sapien
gctcaacttagactataagctaccagtgagcat

SEQ ID NO: 1060904 - DNA, 33 bp, Homo sapien
gctcaacttagactatgagctaccagtgagcat

SEQ ID NO: 1060905 - DNA, 33 bp, Homo sapien
ctgtgagacatttaacggaagatttcctgtaca

SEQ ID NO: 1060906 - DNA, 33 bp, Homo sapien
ctgtgagacatttaactgaagatttcctgtaca

SEQ ID NO: 1060907 - DNA, 33 bp, Homo sapien
aaaatagtaagaacacagaaaataccaaaacag

SEQ ID NO: 1060908 - DNA, 33 bp, Homo sapien
aaaatagtaagaacactgaaaataccaaaacag

SEQ ID NO: 1060909 - DNA, 33 bp, Homo sapien
tttctcttatcaagtaaaatgggaggaagagtg

SEQ ID NO: 1060910 - DNA, 33 bp, Homo sapien
tttctcttatcaagtagaatgggaggaagagtg

SEQ ID NO: 1060911 - DNA, 33 bp, Homo sapien
cccatcagctgggcaacgatattgtggtatgtg

SEQ ID NO: 1060912 - DNA, 33 bp, Homo sapien
cccatcagctgggcaatgatattgtggtatgtg

SEQ ID NO: 1060913 - DNA, 33 bp, Homo sapien
tgtaacataggcagacagctatttaagtggctt

SEQ ID NO: 1060914 - DNA, 33 bp, Homo sapien
tgtaacataggcagaccgctatttaagtggctt

SEQ ID NO: 1060915 - DNA, 33 bp, Homo sapien
aattctgacaccttagaaatatgcacataatta

SEQ ID NO: 1060916 - DNA, 33 bp, Homo sapien
aattctgacaccttagcaatatgcacataatta

SEQ ID NO: 1060917 - DNA, 33 bp, Homo sapien
aaataaaaatagatagaaatggctgcaaaagtc

SEQ ID NO: 1060918 - DNA, 33 bp, Homo sapien
aaataaaaatagatagtaatggctgcaaaagtc

SEQ ID NO: 1060919 - DNA, 33 bp, Homo sapien
tggtttatcaaaacaacgtcgaattcttgaaat

SEQ ID NO: 1060920 - DNA, 33 bp, Homo sapien
tggtttatcaaaacaatgtcgaattcttgaaat

SEQ ID NO: 1060921 - DNA, 33 bp, Homo sapien
tgtcatccttcaatggaccatgccagtgtttcc

SEQ ID NO: 1060922 - DNA, 33 bp, Homo sapien
tgtcatccttcaatgggccatgccagtgtttcc

SEQ ID NO: 1060923 - DNA, 33 bp, Homo sapien
tattataaaaacaaaaatttcccacatctatat

SEQ ID NO: 1060924 - DNA, 33 bp, Homo sapien
tattataaaaacaaaattttcccacatctatat

SEQ ID NO: 1060925 - DNA, 33 bp, Homo sapien
ttaccttatagtgggaaaaacattaggtaaaga

SEQ ID NO: 1060926 - DNA, 33 bp, Homo sapien
ttaccttatagtgggagaaacattaggtaaaga

SEQ ID NO: 1060927 - DNA, 33 bp, Homo sapien
ttcaaaaagacaagcaataacaagtgttggtga

SEQ ID NO: 1060928 - DNA, 33 bp, Homo sapien
ttcaaaaagacaagcagtaacaagtgttggtga

SEQ ID NO: 1060929 - DNA, 33 bp, Homo sapien
gttgtccaatattgtgaagagaaataggaccag

SEQ ID NO: 1060930 - DNA, 33 bp, Homo sapien
gttgtccaatattgtggagagaaataggaccag

SEQ ID NO: 1060931 - DNA, 33 bp, Homo sapien
tcatacaaatatcagactccaggcaaagaagag

SEQ ID NO: 1060932 - DNA, 33 bp, Homo sapien
tcatacaaatatcagagtccaggcaaagaagag

SEQ ID NO: 1060933 - DNA, 33 bp, Homo sapien
tatggtgtgacccaagaactaagacccctgtac

SEQ ID NO: 1060934 - DNA, 33 bp, Homo sapien
tatggtgtgacccaagcactaagacccctgtac

SEQ ID NO: 1060935 - DNA, 33 bp, Homo sapien
tgtacccaacagttccaaagagacagcgaccat

SEQ ID NO: 1060936 - DNA, 33 bp, Homo sapien
tgtacccaacagttccgaagagacagcgaccat

SEQ ID NO: 1060937 - DNA, 33 bp, Homo sapien
gaagctactatgaaaactagtggctctgtgctc

SEQ ID NO: 1060938 - DNA, 33 bp, Homo sapien
gaagctactatgaaaattagtggctctgtgctc

SEQ ID NO: 1060939 - DNA, 33 bp, Homo sapien
ggatatggcaaaattaaaagaacaaatatttaa

SEQ ID NO: 1060940 - DNA, 33 bp, Homo sapien
ggatatggcaaaattagaagaacaaatatttaa

SEQ ID NO: 1060941 - DNA, 33 bp, Homo sapien
gaggtacctttacagacagagggaacaactaca

SEQ ID NO: 1060942 - DNA, 33 bp, Homo sapien
gaggtacctttacagagagagggaacaactaca

SEQ ID NO: 1060943 - DNA, 33 bp, Homo sapien
agcttaatgtcaactaagtactctatatcatat

SEQ ID NO: 1060944 - DNA, 33 bp, Homo sapien
agcttaatgtcaactaggtactctatatcatat

SEQ ID NO: 1060945 - DNA, 33 bp, Homo sapien
atacacaacatcttcaacccattcccagacact

SEQ ID NO: 1060946 - DNA, 33 bp, Homo sapien
atacacaacatcttcaccccattcccagacact

SEQ ID NO: 1060947 - DNA, 33 bp, Homo sapien
acaggcctacagggagaactgagagtgtactgt

SEQ ID NO: 1060948 - DNA, 33 bp, Homo sapien
acaggcctacagggagtactgagagtgtactgt

SEQ ID NO: 1060949 - DNA, 33 bp, Homo sapien
gcaaggagagccagtacaagtctcaaaactgaa

SEQ ID NO: 1060950 - DNA, 33 bp, Homo sapien
gcaaggagagccagtagaagtctcaaaactgaa

SEQ ID NO: 1060951 - DNA, 33 bp, Homo sapien
ctctggctaatctttacgctctgtgaaagcagg

SEQ ID NO: 1060952 - DNA, 33 bp, Homo sapien
ctctggctaatctttatgctctgtgaaagcagg

SEQ ID NO: 1060953 - DNA, 33 bp, Homo sapien
ggccaggatggggtcccgatagaggccagcaga

SEQ ID NO: 1060954 - DNA, 33 bp, Homo sapien
ggccaggatggggtcctgatagaggccagcaga

SEQ ID NO: 1060955 - DNA, 33 bp, Homo sapien
aagggaaagatagggcaacccgtagtagttact

SEQ ID NO: 1060956 - DNA, 33 bp, Homo sapien
aagggaaagatagggccacccgtagtagttact

SEQ ID NO: 1060957 - DNA, 33 bp, Homo sapien
ccaagaaaatcctagacatatggctgtcataac

SEQ ID NO: 1060958 - DNA, 33 bp, Homo sapien
ccaagaaaatcctagatatatggctgtcataac

SEQ ID NO: 1060959 - DNA, 33 bp, Homo sapien
accccaacactgccagcaaggctgccttatcta

SEQ ID NO: 1060960 - DNA, 33 bp, Homo sapien
accccaacactgccagtaaggctgccttatcta

SEQ ID NO: 1060961 - DNA, 33 bp, Homo sapien
taagttcaagttgcaacaggtagaagcagaaat

SEQ ID NO: 1060962 - DNA, 33 bp, Homo sapien
taagttcaagttgcaataggtagaagcagaaat

SEQ ID NO: 1060963 - DNA, 33 bp, Homo sapien
cacagacatacgaaaacgagggtaattcacaag

SEQ ID NO: 1060964 - DNA, 33 bp, Homo sapien
cacagacatacgaaaatgagggtaattcacaag

SEQ ID NO: 1060965 - DNA, 33 bp, Homo sapien
ctctcatacattgcaactagaagaataatcaaa

SEQ ID NO: 1060966 - DNA, 33 bp, Homo sapien
ctctcatacattgcaagtagaagaataatcaaa

SEQ ID NO: 1060967 - DNA, 33 bp, Homo sapien
cagaatcaaaatgataactttccaatctcaact

SEQ ID NO: 1060968 - DNA, 33 bp, Homo sapien
cagaatcaaaatgatacctttccaatctcaact

SEQ ID NO: 1060969 - DNA, 33 bp, Homo sapien
tcatattatcagggacaataggtaccggagtag

SEQ ID NO: 1060970 - DNA, 33 bp, Homo sapien
tcatattatcagggactataggtaccggagtag

SEQ ID NO: 1060971 - DNA, 33 bp, Homo sapien
gttatgttacatggaaataagctctctgataaa

SEQ ID NO: 1060972 - DNA, 33 bp, Homo sapien
gttatgttacatggaagtaagctctctgataaa

SEQ ID NO: 1060973 - DNA, 33 bp, Homo sapien
ggcagataagagagaaaccgtgttggcaagtga

SEQ ID NO: 1060974 - DNA, 33 bp, Homo sapien
ggcagataagagagaagccgtgttggcaagtga

SEQ ID NO: 1060975 - DNA, 33 bp, Homo sapien
acttcacattgacaaaaaggtattttatgacct

SEQ ID NO: 1060976 - DNA, 33 bp, Homo sapien
acttcacattgacaaagaggtattttatgacct

SEQ ID NO: 1060977 - DNA, 33 bp, Homo sapien
tagtttactgtcattcccaacactattgacatc

SEQ ID NO: 1060978 - DNA, 33 bp, Homo sapien
tagtttactgtcattctcaacactattgacatc

SEQ ID NO: 1060979 - DNA, 33 bp, Homo sapien
gtggggtttttttcagaacagagaaggagttga

SEQ ID NO: 1060980 - DNA, 33 bp, Homo sapien
gtggggtttttttcaggacagagaaggagttga

SEQ ID NO: 1060981 - DNA, 33 bp, Homo sapien
cagatagctgcttttccatttttcccagagcca

SEQ ID NO: 1060982 - DNA, 33 bp, Homo sapien
cagatagctgcttttctatttttcccagagcca

SEQ ID NO: 1060983 - DNA, 33 bp, Homo sapien
aactacaggagtacgacgtaagaactggagtag

SEQ ID NO: 1060984 - DNA, 33 bp, Homo sapien
aactacaggagtacgatgtaagaactggagtag

SEQ ID NO: 1060985 - DNA, 33 bp, Homo sapien
ggggacagagagccaaaccttatcaatgtggaa

SEQ ID NO: 1060986 - DNA, 33 bp, Homo sapien
ggggacagagagccaatccttatcaatgtggaa

SEQ ID NO: 1060987 - DNA, 33 bp, Homo sapien
atggtagaaaggaggagaaagagatttgggaaa

SEQ ID NO: 1060988 - DNA, 33 bp, Homo sapien
atggtagaaaggaggataaagagatttgggaaa

SEQ ID NO: 1060989 - DNA, 33 bp, Homo sapien
aggagcaagttgaaacccaattcaaagaagctc

SEQ ID NO: 1060990 - DNA, 33 bp, Homo sapien
aggagcaagttgaaacgcaattcaaagaagctc

SEQ ID NO: 1060991 - DNA, 33 bp, Homo sapien
cacacaaatggtatatgaggtaatggatgtgtt

SEQ ID NO: 1060992 - DNA, 33 bp, Homo sapien
cacacaaatggtatattaggtaatggatgtgtt

SEQ ID NO: 1060993 - DNA, 33 bp, Homo sapien
attatttagattcttgcataacagcacctgcac

SEQ ID NO: 1060994 - DNA, 33 bp, Homo sapien
attatttagattcttgtataacagcacctgcac

SEQ ID NO: 1060995 - DNA, 33 bp, Homo sapien
tgtaaagatttccttcacatgtcatgatgtcaa

SEQ ID NO: 1060996 - DNA, 33 bp, Homo sapien
tgtaaagatttccttcgcatgtcatgatgtcaa

SEQ ID NO: 1060997 - DNA, 33 bp, Homo sapien
acaggatgctaaatctgactttcgctgttgtgt

SEQ ID NO: 1060998 - DNA, 33 bp, Homo sapien
acaggatgctaaatcttactttcgctgttgtgt

SEQ ID NO: 1060999 - DNA, 33 bp, Homo sapien
ccaagagaccaagaaacggacaaagggtatgaa

SEQ ID NO: 1061000 - DNA, 33 bp, Homo sapien
ccaagagaccaagaaatggacaaagggtatgaa

SEQ ID NO: 1061001 - DNA, 33 bp, Homo sapien
acatagaataatgacaatggaagtggtatgaaa

SEQ ID NO: 1061002 - DNA, 33 bp, Homo sapien
acatagaataatgacagtggaagtggtatgaaa

SEQ ID NO: 1061003 - DNA, 33 bp, Homo sapien
gagctcctagacaacaaggacctggtgcagtgt

SEQ ID NO: 1061004 - DNA, 33 bp, Homo sapien
gagctcctagacaacacggacctggtgcagtgt

SEQ ID NO: 1061005 - DNA, 33 bp, Homo sapien
tatggccatttttgccaaaacaagatggtaact

SEQ ID NO: 1061006 - DNA, 33 bp, Homo sapien
tatggccatttttgccgaaacaagatggtaact

SEQ ID NO: 1061007 - DNA, 33 bp, Homo sapien
tgggaaactgtaaaaaatgagactgggaagatt

SEQ ID NO: 1061008 - DNA, 33 bp, Homo sapien
tgggaaactgtaaaaagtgagactgggaagatt

SEQ ID NO: 1061009 - DNA, 33 bp, Homo sapien
ctatccattaagacaccgctctaatcctctttc

SEQ ID NO: 1061010 - DNA, 33 bp, Homo sapien
ctatccattaagacactgctctaatcctctttc

SEQ ID NO: 1061011 - DNA, 33 bp, Homo sapien
atgatactttctgactcaaaattttcaatggct

SEQ ID NO: 1061012 - DNA, 33 bp, Homo sapien
atgatactttctgacttaaaattttcaatggct

SEQ ID NO: 1061013 - DNA, 33 bp, Homo sapien
tttatatcttttcattaaaaacacctaactttt

SEQ ID NO: 1061014 - DNA, 33 bp, Homo sapien
tttatatcttttcattgaaaacacctaactttt

SEQ ID NO: 1061015 - DNA, 33 bp, Homo sapien
caaaaacagtgaacaaagttggaatctaacaac

SEQ ID NO: 1061016 - DNA, 33 bp, Homo sapien
caaaaacagtgaacaaggttggaatctaacaac

SEQ ID NO: 1061017 - DNA, 33 bp, Homo sapien
caagatcaaatgactacaggtgtgaggttttat

SEQ ID NO: 1061018 - DNA, 33 bp, Homo sapien
caagatcaaatgactataggtgtgaggttttat

SEQ ID NO: 1061019 - DNA, 33 bp, Homo sapien
tacagtaaccaaaagaacatggcactggtacca

SEQ ID NO: 1061020 - DNA, 33 bp, Homo sapien
tacagtaaccaaaagagcatggcactggtacca

SEQ ID NO: 1061021 - DNA, 33 bp, Homo sapien
acaaagtatcttggtacgcttttctgaaattag

SEQ ID NO: 1061022 - DNA, 33 bp, Homo sapien
acaaagtatcttggtatgcttttctgaaattag

SEQ ID NO: 1061023 - DNA, 33 bp, Homo sapien
aagcttttattagaccagatatcaatcactgct

SEQ ID NO: 1061024 - DNA, 33 bp, Homo sapien
aagcttttattagaccggatatcaatcactgct

SEQ ID NO: 1061025 - DNA, 33 bp, Homo sapien
caaagtgtagttaagaacctgccatttactctc

SEQ ID NO: 1061026 - DNA, 33 bp, Homo sapien
caaagtgtagttaagatcctgccatttactctc

SEQ ID NO: 1061027 - DNA, 33 bp, Homo sapien
atgacatggaggcttacgagatatttgtagggc

SEQ ID NO: 1061028 - DNA, 33 bp, Homo sapien
atgacatggaggcttatgagatatttgtagggc

SEQ ID NO: 1061029 - DNA, 33 bp, Homo sapien
ctctactgaatcttacgacctgactactactca

SEQ ID NO: 1061030 - DNA, 33 bp, Homo sapien
ctctactgaatcttactacctgactactactca

SEQ ID NO: 1061031 - DNA, 33 bp, Homo sapien
catttgcaaacaagctaaagaaccttggtcaaa

SEQ ID NO: 1061032 - DNA, 33 bp, Homo sapien
catttgcaaacaagctgaagaaccttggtcaaa

SEQ ID NO: 1061033 - DNA, 33 bp, Homo sapien
ctaatcttacttcctgaattggcatataggcag

SEQ ID NO: 1061034 - DNA, 33 bp, Homo sapien
ctaatcttacttcctgcattggcatataggcag

SEQ ID NO: 1061035 - DNA, 33 bp, Homo sapien
aggtaggaaaattgcaaccgataaagcagatag

SEQ ID NO: 1061036 - DNA, 33 bp, Homo sapien
aggtaggaaaattgcagccgataaagcagatag

SEQ ID NO: 1061037 - DNA, 33 bp, Homo sapien
aaacaggcaatgggcaaagctctcaagtgactc

SEQ ID NO: 1061038 - DNA, 33 bp, Homo sapien
aaacaggcaatgggcagagctctcaagtgactc

SEQ ID NO: 1061039 - DNA, 33 bp, Homo sapien
ttcttacttgctgcaaatatcagctctgaagag

SEQ ID NO: 1061040 - DNA, 33 bp, Homo sapien
ttcttacttgctgcaattatcagctctgaagag

SEQ ID NO: 1061041 - DNA, 33 bp, Homo sapien
caatcattctccagtggaagatactcaagaaca

SEQ ID NO: 1061042 - DNA, 33 bp, Homo sapien
caatcattctccagtgtaagatactcaagaaca

SEQ ID NO: 1061043 - DNA, 33 bp, Homo sapien
tatcagtaccaagggacgacttaatttgctcac

SEQ ID NO: 1061044 - DNA, 33 bp, Homo sapien
tatcagtaccaagggatgacttaatttgctcac

SEQ ID NO: 1061045 - DNA, 33 bp, Homo sapien
tcaagtatcacacctgaatgatgaatatattgt

SEQ ID NO: 1061046 - DNA, 33 bp, Homo sapien
tcaagtatcacacctgtatgatgaatatattgt

SEQ ID NO: 1061047 - DNA, 33 bp, Homo sapien
gtcagaatataattgccaaaagactagaggagc

SEQ ID NO: 1061048 - DNA, 33 bp, Homo sapien
gtcagaatataattgcgaaaagactagaggagc

SEQ ID NO: 1061049 - DNA, 33 bp, Homo sapien
ttttatatcccaggaagttgaaagtaatgattg

SEQ ID NO: 1061050 - DNA, 33 bp, Homo sapien
ttttatatcccaggaatttgaaagtaatgattg

SEQ ID NO: 1061051 - DNA, 33 bp, Homo sapien
aagtagataatgcggtcaatacaggtgaccaca

SEQ ID NO: 1061052 - DNA, 33 bp, Homo sapien
aagtagataatgcggttaatacaggtgaccaca

SEQ ID NO: 1061053 - DNA, 33 bp, Homo sapien
gttagaaagaaaataacatctgtgaatcacatg

SEQ ID NO: 1061054 - DNA, 33 bp, Homo sapien
gttagaaagaaaataagatctgtgaatcacatg

SEQ ID NO: 1061055 - DNA, 33 bp, Homo sapien
atgcctttatgagtacaaatttctgaatctagt

SEQ ID NO: 1061056 - DNA, 33 bp, Homo sapien
atgcctttatgagtactaatttctgaatctagt

SEQ ID NO: 1061057 - DNA, 33 bp, Homo sapien
gggaagtaggagagaactgtcacctgatggcat

SEQ ID NO: 1061058 - DNA, 33 bp, Homo sapien
gggaagtaggagagaattgtcacctgatggcat

SEQ ID NO: 1061059 - DNA, 33 bp, Homo sapien
gatttaggtaaagcaaccaacagggctttctgg

SEQ ID NO: 1061060 - DNA, 33 bp, Homo sapien
gatttaggtaaagcaatcaacagggctttctgg

SEQ ID NO: 1061061 - DNA, 33 bp, Homo sapien
tctcatttttaggaaaagaatcaactaggagaa

SEQ ID NO: 1061062 - DNA, 33 bp, Homo sapien
tctcatttttaggaaaggaatcaactaggagaa

SEQ ID NO: 1061063 - DNA, 33 bp, Homo sapien
ctctactaaagtgaaaataagtttagtggcaga

SEQ ID NO: 1061064 - DNA, 33 bp, Homo sapien
ctctactaaagtgaaagtaagtttagtggcaga

SEQ ID NO: 1061065 - DNA, 33 bp, Homo sapien; identical to SEQ ID NO: 1061063

SEQ ID NO: 1061066 - DNA, 33 bp, Homo sapien; identical to SEQ ID NO: 1061064

SEQ ID NO: 1061067 - DNA, 33 bp, Homo sapien
aacaggaggactagatcaacagttttattagga

SEQ ID NO: 1061068 - DNA, 33 bp, Homo sapien
aacaggaggactagatgaacagttttattagga

SEQ ID NO: 1061069 - DNA, 33 bp, Homo sapien
ttggtgaccgcttaacgaattgaattaatacaa

SEQ ID NO: 1061070 - DNA, 33 bp, Homo sapien
ttggtgaccgcttaactaattgaattaatacaa

SEQ ID NO: 1061071 - DNA, 33 bp, Homo sapien
tcacatagttggtgggcaataactctaatgctt

SEQ ID NO: 1061072 - DNA, 33 bp, Homo sapien
tcacatagttggtgggtaataactctaatgctt

SEQ ID NO: 1061073 - DNA, 33 bp, Homo sapien
cctgatgagtgtcctgaaagagtgtccagttct

SEQ ID NO: 1061074 - DNA, 33 bp, Homo sapien
cctgatgagtgtcctggaagagtgtccagttct

SEQ ID NO: 1061075 - DNA, 33 bp, Homo sapien
gaagcccctgactcaaaatgttctgccagtgtg

SEQ ID NO: 1061076 - DNA, 33 bp, Homo sapien
gaagcccctgactcaagatgttctgccagtgtg

SEQ ID NO: 1061077 - DNA, 33 bp, Homo sapien
atcctgtcctcaaagaggctttataaggcacat

SEQ ID NO: 1061078 - DNA, 33 bp, Homo sapien
atcctgtcctcaaagatgctttataaggcacat

SEQ ID NO: 1061079 - DNA, 33 bp, Homo sapien
tgtaggaatgacttgccatgtttttatggatta

SEQ ID NO: 1061080 - DNA, 33 bp, Homo sapien
tgtaggaatgacttgctatgtttttatggatta

SEQ ID NO: 1061081 - DNA, 33 bp, Homo sapien
gattctcaagtgtgaccagttagctggctaaag

SEQ ID NO: 1061082 - DNA, 33 bp, Homo sapien
gattctcaagtgtgactagttagctggctaaag

SEQ ID NO: 1061083 - DNA, 33 bp, Homo sapien
aaaagtactctgaagaagtgacattttgagtag

SEQ ID NO: 1061084 - DNA, 33 bp, Homo sapien
aaaagtactctgaagaggtgacattttgagtag

SEQ ID NO: 1061085 - DNA, 33 bp, Homo sapien
gtctcagctctctctaacacctaattcacaatc

SEQ ID NO: 1061086 - DNA, 33 bp, Homo sapien
gtctcagctctctctagcacctaattcacaatc

SEQ ID NO: 1061087 - DNA, 33 bp, Homo sapien
gcagaggactagaatacctagagcagtaatttt

SEQ ID NO: 1061088 - DNA, 33 bp, Homo sapien
gcagaggactagaatatctagagcagtaatttt

SEQ ID NO: 1061089 - DNA, 33 bp, Homo sapien
ccataaatccatggctaaccttgacaaatacac

SEQ ID NO: 1061090 - DNA, 33 bp, Homo sapien
ccataaatccatggctcaccttgacaaatacac

SEQ ID NO: 1061091 - DNA, 33 bp, Homo sapien
attcttccatagtcacgctgttcaaatgaatat

SEQ ID NO: 1061092 - DNA, 33 bp, Homo sapien
attcttccatagtcactctgttcaaatgaatat

SEQ ID NO: 1061093 - DNA, 33 bp, Homo sapien
agtggaagctctcaacactctgtaagggtctcc

SEQ ID NO: 1061094 - DNA, 33 bp, Homo sapien
agtggaagctctcaacgctctgtaagggtctcc

SEQ ID NO: 1061095 - DNA, 33 bp, Homo sapien
ctaaattaaataataaatcagcatgtctgtaaa

SEQ ID NO: 1061096 - DNA, 33 bp, Homo sapien
ctaaattaaataataattcagcatgtctgtaaa

SEQ ID NO: 1061097 - DNA, 33 bp, Homo sapien
acagggtgagaagtaccaacaacatcctgtgta

SEQ ID NO: 1061098 - DNA, 33 bp, Homo sapien
acagggtgagaagtacgaacaacatcctgtgta

SEQ ID NO: 1061099 - DNA, 33 bp, Homo sapien
caggtatgaatatgagcatataggtagttttat

SEQ ID NO: 1061100 - DNA, 33 bp, Homo sapien
caggtatgaatatgaggatataggtagttttat

SEQ ID NO: 1061101 - DNA, 33 bp, Homo sapien
tccattggttcaaatactaatggcactcagaag

SEQ ID NO: 1061102 - DNA, 33 bp, Homo sapien
tccattggttcaaatattaatggcactcagaag

SEQ ID NO: 1061103 - DNA, 33 bp, Homo sapien
gagatgattcaataacgggagcaatttacccca

SEQ ID NO: 1061104 - DNA, 33 bp, Homo sapien
gagatgattcaataactggagcaatttacccca

SEQ ID NO: 1061105 - DNA, 33 bp, Homo sapien
ttgcggtggcccactacctatgcaagcaactcg

SEQ ID NO: 1061106 - DNA, 33 bp, Homo sapien
ttgcggtggcccactatctatgcaagcaactcg

SEQ ID NO: 1061107 - DNA, 33 bp, Homo sapien
cattttaatctctcaaactttcccgaagaaaga

SEQ ID NO: 1061108 - DNA, 33 bp, Homo sapien
cattttaatctctcaacctttcccgaagaaaga

SEQ ID NO: 1061109 - DNA, 33 bp, Homo sapien
aatgcatccttattcccgattttagaacaaaaa

SEQ ID NO: 1061110 - DNA, 33 bp, Homo sapien
aatgcatccttattcctgattttagaacaaaaa

SEQ ID NO: 1061111 - DNA, 33 bp, Homo sapien
atcaaaacatggtactaaatttagaaactgcta

SEQ ID NO: 1061112 - DNA, 33 bp, Homo sapien
atcaaaacatggtacttaatttagaaactgcta

SEQ ID NO: 1061113 - DNA, 33 bp, Homo sapien
tcagatcacaatatccaagtccttatgggtatc

SEQ ID NO: 1061114 - DNA, 33 bp, Homo sapien
tcagatcacaatatccgagtccttatgggtatc

SEQ ID NO: 1061115 - DNA, 33 bp, Homo sapien
tctagttcctagcttaacttttgtctagttctg

SEQ ID NO: 1061116 - DNA, 33 bp, Homo sapien
tctagttcctagcttatcttttgtctagttctg

SEQ ID NO: 1061117 - DNA, 33 bp, Homo sapien
aaatgtaaacttacagaatgcagataaagtagt

SEQ ID NO: 1061118 - DNA, 33 bp, Homo sapien
aaatgtaaacttacaggatgcagataaagtagt

SEQ ID NO: 1061119 - DNA, 33 bp, Homo sapien
agccagagatttgagtaaaaaaggttaatagtc

SEQ ID NO: 1061120 - DNA, 33 bp, Homo sapien
agccagagatttgagtcaaaaaggttaatagtc

SEQ ID NO: 1061121 - DNA, 33 bp, Homo sapien
tcggagaaatgtaaataacagctacaaagaggt

SEQ ID NO: 1061122 - DNA, 33 bp, Homo sapien
tcggagaaatgtaaatgacagctacaaagaggt

SEQ ID NO: 1061123 - DNA, 33 bp, Homo sapien
tctcataatctcttgaacgactgtttccataga

SEQ ID NO: 1061124 - DNA, 33 bp, Homo sapien
tctcataatctcttgagcgactgtttccataga

SEQ ID NO: 1061125 - DNA, 33 bp, Homo sapien
aggcttttttccattaacaaaatagtggtaaca

SEQ ID NO: 1061126 - DNA, 33 bp, Homo sapien
aggcttttttccattagcaaaatagtggtaaca

SEQ ID NO: 1061127 - DNA, 33 bp, Homo sapien
ctgcatgcatcaagtaaattgttcacctctacc

SEQ ID NO: 1061128 - DNA, 33 bp, Homo sapien
ctgcatgcatcaagtacattgttcacctctacc

SEQ ID NO: 1061129 - DNA, 33 bp, Homo sapien
caggcacagagccaggaacatttgggcatggga

SEQ ID NO: 1061130 - DNA, 33 bp, Homo sapien
caggcacagagccagggacatttgggcatggga

SEQ ID NO: 1061131 - DNA, 33 bp, Homo sapien
cccagactgctggaacaaaaccaggtggagcaa

SEQ ID NO: 1061132 - DNA, 33 bp, Homo sapien
cccagactgctggaactaaaccaggtggagcaa

SEQ ID NO: 1061133 - DNA, 33 bp, Homo sapien
cctgcattcaattaacactgtaatgttaacagc

SEQ ID NO: 1061134 - DNA, 33 bp, Homo sapien
cctgcattcaattaaccctgtaatgttaacagc

SEQ ID NO: 1061135 - DNA, 33 bp, Homo sapien
cacaaataaagtgattcaagacacaagcagaat

SEQ ID NO: 1061136 - DNA, 33 bp, Homo sapien
cacaaataaagtgatttaagacacaagcagaat

SEQ ID NO: 1061137 - DNA, 33 bp, Homo sapien
cattaaagtagttgataagttctaggggccccc

SEQ ID NO: 1061138 - DNA, 33 bp, Homo sapien
cattaaagtagttgatcagttctaggggccccc

SEQ ID NO: 1061139 - DNA, 33 bp, Homo sapien
taatatccagaacctacagagaacataaatcaa

SEQ ID NO: 1061140 - DNA, 33 bp, Homo sapien
taatatccagaacctatagagaacataaatcaa

SEQ ID NO: 1061141 - DNA, 33 bp, Homo sapien
tgcacatatatgagaaatggtctaacaaaataa

SEQ ID NO: 1061142 - DNA, 33 bp, Homo sapien
tgcacatatatgagaagtggtctaacaaaataa

SEQ ID NO: 1061143 - DNA, 33 bp, Homo sapien
gtcaaacacaaaatcacagttcaaggatttatc

SEQ ID NO: 1061144 - DNA, 33 bp, Homo sapien
gtcaaacacaaaatcatagttcaaggatttatc

SEQ ID NO: 1061145 - DNA, 33 bp, Homo sapien
gacttcttcctgttcactactggggtcaaacac

SEQ ID NO: 1061146 - DNA, 33 bp, Homo sapien
gacttcttcctgttcattactggggtcaaacac

SEQ ID NO: 1061147 - DNA, 33 bp, Homo sapien
ctgctcttcaaagaaactgataaaaagagtgac

SEQ ID NO: 1061148 - DNA, 33 bp, Homo sapien
ctgctcttcaaagaaattgataaaaagagtgac

SEQ ID NO: 1061149 - DNA, 33 bp, Homo sapien
aaataaatatatgggaagatcctaaggttattg

SEQ ID NO: 1061150 - DNA, 33 bp, Homo sapien
aaataaatatatgggacgatcctaaggttattg

SEQ ID NO: 1061151 - DNA, 33 bp, Homo sapien
ctgacagagcaagaaaaaccaggaacaaacctg

SEQ ID NO: 1061152 - DNA, 33 bp, Homo sapien
ctgacagagcaagaaacaccaggaacaaacctg

SEQ ID NO: 1061153 - DNA, 33 bp, Homo sapien
ttgcagagataggtaaagcaccaaaattgtctt

SEQ ID NO: 1061154 - DNA, 33 bp, Homo sapien
ttgcagagataggtaatgcaccaaaattgtctt

SEQ ID NO: 1061155 - DNA, 33 bp, Homo sapien
aatttataccttggagacaagaatgtttaacac

SEQ ID NO: 1061156 - DNA, 33 bp, Homo sapien
aatttataccttggaggcaagaatgtttaacac

SEQ ID NO: 1061157 - DNA, 33 bp, Homo sapien
ctactgatcctgttacacagctagtaagcataa

SEQ ID NO: 1061158 - DNA, 33 bp, Homo sapien
ctactgatcctgttacgcagctagtaagcataa

SEQ ID NO: 1061159 - DNA, 33 bp, Homo sapien
gatacccactcaagaaacctacagaacaactca

SEQ ID NO: 1061160 - DNA, 33 bp, Homo sapien
gatacccactcaagaagcctacagaacaactca

SEQ ID NO: 1061161 - DNA, 33 bp, Homo sapien
agtatagtgttatttaaaagtgaacttagagta

SEQ ID NO: 1061162 - DNA, 33 bp, Homo sapien
agtatagtgttatttagaagtgaacttagagta

SEQ ID NO: 1061163 - DNA, 33 bp, Homo sapien
taactacaagaggtataacgtttgtgtaatggc

SEQ ID NO: 1061164 - DNA, 33 bp, Homo sapien
taactacaagaggtatgacgtttgtgtaatggc

SEQ ID NO: 1061165 - DNA, 33 bp, Homo sapien
gttttatctctggaaaacacttatatacatggt

SEQ ID NO: 1061166 - DNA, 33 bp, Homo sapien
gttttatctctggaaaccacttatatacatggt

SEQ ID NO: 1061167 - DNA, 33 bp, Homo sapien
ccatatggtaatttccacaatattcattctacc

SEQ ID NO: 1061168 - DNA, 33 bp, Homo sapien
ccatatggtaatttccgcaatattcattctacc

SEQ ID NO: 1061169 - DNA, 33 bp, Homo sapien
catgaatgggattagcaaatttatgaaagagct

SEQ ID NO: 1061170 - DNA, 33 bp, Homo sapien
catgaatgggattagcgaatttatgaaagagct

SEQ ID NO: 1061171 - DNA, 33 bp, Homo sapien
ataaaaagttgaacacaatatgtccatttcaac

SEQ ID NO: 1061172 - DNA, 33 bp, Homo sapien
ataaaaagttgaacacgatatgtccatttcaac

SEQ ID NO: 1061173 - DNA, 33 bp, Homo sapien
caggagtaaaagtgcaagtttgttacttaagta

SEQ ID NO: 1061174 - DNA, 33 bp, Homo sapien
caggagtaaaagtgcaggtttgttacttaagta

SEQ ID NO: 1061175 - DNA, 33 bp, Homo sapien
ttttctctagtcaccaatacagaattttttaag

SEQ ID NO: 1061176 - DNA, 33 bp, Homo sapien
ttttctctagtcaccactacagaattttttaag

SEQ ID NO: 1061177 - DNA, 33 bp, Homo sapien
gagagaatacaagaaacagcctagcggagaatc

SEQ ID NO: 1061178 - DNA, 33 bp, Homo sapien
gagagaatacaagaaagagcctagcggagaatc

SEQ ID NO: 1061179 - DNA, 33 bp, Homo sapien
ttctacaaaccagcagaataggtccacccacag

SEQ ID NO: 1061180 - DNA, 33 bp, Homo sapien
ttctacaaaccagcagtataggtccacccacag

SEQ ID NO: 1061181 - DNA, 33 bp, Homo sapien
tagtgtatttgcgatgcagatttagaattctaa

SEQ ID NO: 1061182 - DNA, 33 bp, Homo sapien
tagtgtatttgcgatggagatttagaattctaa

SEQ ID NO: 1061183 - DNA, 33 bp, Homo sapien
tatgctatataccttcaatacaaagtacaatag

SEQ ID NO: 1061184 - DNA, 33 bp, Homo sapien
tatgctatataccttcgatacaaagtacaatag

SEQ ID NO: 1061185 - DNA, 33 bp, Homo sapien
cttaacaataggaagaagcttaggtgaagtata

SEQ ID NO: 1061186 - DNA, 33 bp, Homo sapien
cttaacaataggaagaggcttaggtgaagtata

SEQ ID NO: 1061187 - DNA, 33 bp, Homo sapien
ttggaattgtgtttaactctcagacttcaaatt

SEQ ID NO: 1061188 - DNA, 33 bp, Homo sapien
ttggaattgtgtttaattctcagacttcaaatt

SEQ ID NO: 1061189 - DNA, 33 bp, Homo sapien
gattgaactcaacaaactctactaaaccactta

SEQ ID NO: 1061190 - DNA, 33 bp, Homo sapien
gattgaactcaacaaagtctactaaaccactta

SEQ ID NO: 1061191 - DNA, 33 bp, Homo sapien
tataaattaattcaataaaaatcgctctattct

SEQ ID NO: 1061192 - DNA, 33 bp, Homo sapien
tataaattaattcaatcaaaatcgctctattct

SEQ ID NO: 1061193 - DNA, 33 bp, Homo sapien
atggaagcagaagcaagtatgccatctctgcta

SEQ ID NO: 1061194 - DNA, 33 bp, Homo sapien
atggaagcagaagcaattatgccatctctgcta

SEQ ID NO: 1061195 - DNA, 33 bp, Homo sapien
tagcaacttgcctgtacgttattctacactcaa

SEQ ID NO: 1061196 - DNA, 33 bp, Homo sapien
tagcaacttgcctgtatgttattctacactcaa

SEQ ID NO: 1061197 - DNA, 33 bp, Homo sapien
tatataaagtgaatgcaagtccaatttaacatt

SEQ ID NO: 1061198 - DNA, 33 bp, Homo sapien
tatataaagtgaatgcgagtccaatttaacatt

SEQ ID NO: 1061199 - DNA, 33 bp, Homo sapien
agaaaaaatttatgaaagggcaactgatattaa

SEQ ID NO: 1061200 - DNA, 33 bp, Homo sapien
agaaaaaatttatgaaggggcaactgatattaa

SEQ ID NO: 1061201 - DNA, 33 bp, Homo sapien
acatctgaattgaagagatttaagaccaaactt

SEQ ID NO: 1061202 - DNA, 33 bp, Homo sapien
acatctgaattgaagatatttaagaccaaactt

SEQ ID NO: 1061203 - DNA, 33 bp, Homo sapien
ataagttgaaactgtacgttgagcactcatgga

SEQ ID NO: 1061204 - DNA, 33 bp, Homo sapien
ataagttgaaactgtatgttgagcactcatgga

SEQ ID NO: 1061205 - DNA, 33 bp, Homo sapien
gaaataaagggcatccacattggaaaggaaaaa

SEQ ID NO: 1061206 - DNA, 33 bp, Homo sapien
gaaataaagggcatccgcattggaaaggaaaaa

SEQ ID NO: 1061207 - DNA, 33 bp, Homo sapien
cattttgcagtttcaggataatcaggtaaataa

SEQ ID NO: 1061208 - DNA, 33 bp, Homo sapien
cattttgcagtttcagtataatcaggtaaataa

SEQ ID NO: 1061209 - DNA, 33 bp, Homo sapien
tagtgaaacacaagtacagatgagaaaagaatg

SEQ ID NO: 1061210 - DNA, 33 bp, Homo sapien
tagtgaaacacaagtagagatgagaaaagaatg

SEQ ID NO: 1061211 - DNA, 33 bp, Homo sapien
ttttgattttcatttgcatagaatacctttatt

SEQ ID NO: 1061212 - DNA, 33 bp, Homo sapien
ttttgattttcatttggatagaatacctttatt

SEQ ID NO: 1061213 - DNA, 33 bp, Homo sapien
aagatatgttgttgaagaataaagcactcattt

SEQ ID NO: 1061214 - DNA, 33 bp, Homo sapien
aagatatgttgttgaataataaagcactcattt

SEQ ID NO: 1061215 - DNA, 33 bp, Homo sapien
tgattttgtgttatcacgtatggctcatttgat

SEQ ID NO: 1061216 - DNA, 33 bp, Homo sapien
tgattttgtgttatcaggtatggctcatttgat

SEQ ID NO: 1061217 - DNA, 33 bp, Homo sapien
agtctgggaacggtgcaaaggagaataaagagg

SEQ ID NO: 1061218 - DNA, 33 bp, Homo sapien
agtctgggaacggtgcgaaggagaataaagagg

SEQ ID NO: 1061219 - DNA, 33 bp, Homo sapien
ttgtcattgaattttacagtcattagttgtttt

SEQ ID NO: 1061220 - DNA, 33 bp, Homo sapien
ttgtcattgaattttagagtcattagttgtttt

SEQ ID NO: 1061221 - DNA, 33 bp, Homo sapien
ttcccacatttccacacaagctgaagagagcag

SEQ ID NO: 1061222 - DNA, 33 bp, Homo sapien
ttcccacatttccacataagctgaagagagcag

SEQ ID NO: 1061223 - DNA, 33 bp, Homo sapien
tagcaacagcactgccgcattgaacagatgatc

SEQ ID NO: 1061224 - DNA, 33 bp, Homo sapien
tagcaacagcactgcctcattgaacagatgatc

SEQ ID NO: 1061225 - DNA, 33 bp, Homo sapien
cataaaaagtctgtatcaggttgaatgataagg

SEQ ID NO: 1061226 - DNA, 33 bp, Homo sapien
cataaaaagtctgtatgaggttgaatgataagg

SEQ ID NO: 1061227 - DNA, 33 bp, Homo sapien
atctagcccttcacctaaaacaacagagaccac

SEQ ID NO: 1061228 - DNA, 33 bp, Homo sapien
atctagcccttcacctgaaacaacagagaccac

SEQ ID NO: 1061229 - DNA, 33 bp, Homo sapien
atttgagtagggacaaatatccaagttatatca

SEQ ID NO: 1061230 - DNA, 33 bp, Homo sapien
atttgagtagggacaagtatccaagttatatca

SEQ ID NO: 1061231 - DNA, 33 bp, Homo sapien
atgtaaatatgtctagcaatttgttgccccaca

SEQ ID NO: 1061232 - DNA, 33 bp, Homo sapien
atgtaaatatgtctagtaatttgttgccccaca

SEQ ID NO: 1061233 - DNA, 33 bp, Homo sapien
gcaggaccattctcaagaccctagatctctaaa

SEQ ID NO: 1061234 - DNA, 33 bp, Homo sapien
gcaggaccattctcaataccctagatctctaaa

SEQ ID NO: 1061235 - DNA, 33 bp, Homo sapien
gctatcctgacagccaagtggcaattcttcttt

SEQ ID NO: 1061236 - DNA, 33 bp, Homo sapien
gctatcctgacagccaggtggcaattcttcttt

SEQ ID NO: 1061237 - DNA, 33 bp, Homo sapien
tcaaaactagcaaagacaatcattcaaagcgct

SEQ ID NO: 1061238 - DNA, 33 bp, Homo sapien
tcaaaactagcaaagataatcattcaaagcgct

SEQ ID NO: 1061239 - DNA, 33 bp, Homo sapien
acattttcaatactgaagggagcaaaagaaagc

SEQ ID NO: 1061240 - DNA, 33 bp, Homo sapien
acattttcaatactgacgggagcaaaagaaagc

SEQ ID NO: 1061241 - DNA, 33 bp, Homo sapien
attctgaagcaactagacattgaagaaacataa

SEQ ID NO: 1061242 - DNA, 33 bp, Homo sapien
attctgaagcaactaggcattgaagaaacataa

SEQ ID NO: 1061243 - DNA, 33 bp, Homo sapien
tataaaaatggcagcaatcatgcaccccacact

SEQ ID NO: 1061244 - DNA, 33 bp, Homo sapien
tataaaaatggcagcagtcatgcaccccacact

SEQ ID NO: 1061245 - DNA, 33 bp, Homo sapien
agtgtgtgattaagtacccctctatgcacacta

SEQ ID NO: 1061246 - DNA, 33 bp, Homo sapien
agtgtgtgattaagtatccctctatgcacacta

SEQ ID NO: 1061247 - DNA, 33 bp, Homo sapien
attaactcaatctacacggtgtaattcctgaaa

SEQ ID NO: 1061248 - DNA, 33 bp, Homo sapien
attaactcaatctacatggtgtaattcctgaaa

SEQ ID NO: 1061249 - DNA, 33 bp, Homo sapien
ttagatgcctttgtcacgttttaaagataagtt

SEQ ID NO: 1061250 - DNA, 33 bp, Homo sapien
ttagatgcctttgtcatgttttaaagataagtt

SEQ ID NO: 1061251 - DNA, 33 bp, Homo sapien
tccctgaatttgcaccagcatttgttattatta

SEQ ID NO: 1061252 - DNA, 33 bp, Homo sapien
tccctgaatttgcaccggcatttgttattatta

SEQ ID NO: 1061253 - DNA, 33 bp, Homo sapien
actgagagtatagttgcattgtttgtaacataa

SEQ ID NO: 1061254 - DNA, 33 bp, Homo sapien
actgagagtatagttggattgtttgtaacataa

SEQ ID NO: 1061255 - DNA, 33 bp, Homo sapien
acagttgtgggcatccaacttagttctggcaaa

SEQ ID NO: 1061256 - DNA, 33 bp, Homo sapien
acagttgtgggcatccgacttagttctggcaaa

SEQ ID NO: 1061257 - DNA, 33 bp, Homo sapien
aggggaacactacaaaagtctttgctttatctc

SEQ ID NO: 1061258 - DNA, 33 bp, Homo sapien
aggggaacactacaaaggtctttgctttatctc

SEQ ID NO: 1061259 - DNA, 33 bp, Homo sapien
tttgttacataggtaaatgtatgccatagtggt

SEQ ID NO: 1061260 - DNA, 33 bp, Homo sapien
tttgttacataggtaagtgtatgccatagtggt

SEQ ID NO: 1061261 - DNA, 33 bp, Homo sapien
ataaaagagaatgtcacgtagtaatttagagca

SEQ ID NO: 1061262 - DNA, 33 bp, Homo sapien
ataaaagagaatgtcatgtagtaatttagagca

SEQ ID NO: 1061263 - DNA, 33 bp, Homo sapien
aagtcagcacctttcaacatctcactcaaggcc

SEQ ID NO: 1061264 - DNA, 33 bp, Homo sapien
aagtcagcacctttcagcatctcactcaaggcc

SEQ ID NO: 1061265 - DNA, 33 bp, Homo sapien
ctgggctagaagaaaacctgctgccttgagaga

SEQ ID NO: 1061266 - DNA, 33 bp, Homo sapien
ctgggctagaagaaaatctgctgccttgagaga

SEQ ID NO: 1061267 - DNA, 33 bp, Homo sapien
gaaacgtcgctatagaactgcattttgtgagca

SEQ ID NO: 1061268 - DNA, 33 bp, Homo sapien
gaaacgtcgctatagacctgcattttgtgagca

SEQ ID NO: 1061269 - DNA, 33 bp, Homo sapien
agagaaaatgaaaatcactccactaacttaagg

SEQ ID NO: 1061270 - DNA, 33 bp, Homo sapien
agagaaaatgaaaatcgctccactaacttaagg

SEQ ID NO: 1061271 - DNA, 33 bp, Homo sapien
caccaaagagctctgacggatatatgaaaggaa

SEQ ID NO: 1061272 - DNA, 33 bp, Homo sapien
caccaaagagctctgatggatatatgaaaggaa

SEQ ID NO: 1061273 - DNA, 33 bp, Homo sapien
ctgattactttatacaaaagccaatgcccagtc

SEQ ID NO: 1061274 - DNA, 33 bp, Homo sapien
ctgattactttatacagaagccaatgcccagtc

SEQ ID NO: 1061275 - DNA, 33 bp, Homo sapien
agacaaagaagagctacctgatgtgagtattga

SEQ ID NO: 1061276 - DNA, 33 bp, Homo sapien
agacaaagaagagctatctgatgtgagtattga

SEQ ID NO: 1061277 - DNA, 33 bp, Homo sapien
aaccagagaacctcagcagagagtagcttttga

SEQ ID NO: 1061278 - DNA, 33 bp, Homo sapien
aaccagagaacctcaggagagagtagcttttga

SEQ ID NO: 1061279 - DNA, 33 bp, Homo sapien
cttactaaccaaacctcagaattattcctcttg

SEQ ID NO: 1061280 - DNA, 33 bp, Homo sapien
cttactaaccaaaccttagaattattcctcttg

SEQ ID NO: 1061281 - DNA, 33 bp, Homo sapien
ggtgcaagagacaaaaatatgaataggacacag

SEQ ID NO: 1061282 - DNA, 33 bp, Homo sapien
ggtgcaagagacaaaagtatgaataggacacag

SEQ ID NO: 1061283 - DNA, 33 bp, Homo sapien
gggtacccagtaaggacagtttattctggaacc

SEQ ID NO: 1061284 - DNA, 33 bp, Homo sapien
gggtacccagtaaggatagtttattctggaacc

SEQ ID NO: 1061285 - DNA, 33 bp, Homo sapien
agaggacagagaaggcaaaggagaaaaaaagaa

SEQ ID NO: 1061286 - DNA, 33 bp, Homo sapien
agaggacagagaaggctaaggagaaaaaaagaa

SEQ ID NO: 1061287 - DNA, 33 bp, Homo sapien
ctggagtttcctccaactatctggagttgcctg

SEQ ID NO: 1061288 - DNA, 33 bp, Homo sapien
ctggagtttcctccaattatctggagttgcctg

SEQ ID NO: 1061289 - DNA, 33 bp, Homo sapien
gtttttttttccttacccatcgagtggtcctag

SEQ ID NO: 1061290 - DNA, 33 bp, Homo sapien
gtttttttttccttactcatcgagtggtcctag

SEQ ID NO: 1061291 - DNA, 33 bp, Homo sapien
ctgttattgctttgtaagtaatttgcattttat

SEQ ID NO: 1061292 - DNA, 33 bp, Homo sapien
ctgttattgctttgtaggtaatttgcattttat

SEQ ID NO: 1061293 - DNA, 33 bp, Homo sapien
ttaggactaaataaaagagcccaacacagtaac

SEQ ID NO: 1061294 - DNA, 33 bp, Homo sapien
ttaggactaaataaaatagcccaacacagtaac

SEQ ID NO: 1061295 - DNA, 33 bp, Homo sapien
agaatagcaacttcaaatattaaaggaacatga

SEQ ID NO: 1061296 - DNA, 33 bp, Homo sapien
agaatagcaacttcaagtattaaaggaacatga

SEQ ID NO: 1061297 - DNA, 33 bp, Homo sapien
aaaaatcaaaaaacaaccgatgttagtatggat

SEQ ID NO: 1061298 - DNA, 33 bp, Homo sapien
aaaaatcaaaaaacaatcgatgttagtatggat

SEQ ID NO: 1061299 - DNA, 33 bp, Homo sapien
tattttactggctaaagaaagttataatcatgg

SEQ ID NO: 1061300 - DNA, 33 bp, Homo sapien
tattttactggctaaataaagttataatcatgg

SEQ ID NO: 1061301 - DNA, 33 bp, Homo sapien
tactctctgtgtctataagttacattgttttga

SEQ ID NO: 1061302 - DNA, 33 bp, Homo sapien
tactctctgtgtctatcagttacattgttttga

SEQ ID NO: 1061303 - DNA, 33 bp, Homo sapien
agccctttctgttgtacgttgacttattagcaa

SEQ ID NO: 1061304 - DNA, 33 bp, Homo sapien
agccctttctgttgtatgttgacttattagcaa

SEQ ID NO: 1061305 - DNA, 33 bp, Homo sapien
tctgacatatgatgtaagttttcatatcagtca

SEQ ID NO: 1061306 - DNA, 33 bp, Homo sapien
tctgacatatgatgtaggttttcatatcagtca

SEQ ID NO: 1061307 - DNA, 33 bp, Homo sapien; identical to SEQ ID NO: 1061305

SEQ ID NO: 1061308 - DNA, 33 bp, Homo sapien; identical to SEQ ID NO: 1061306

SEQ ID NO: 1061309 - DNA, 33 bp, Homo sapien
gtccaacaatgccaacagaacccaagtgaatca

SEQ ID NO: 1061310 - DNA, 33 bp, Homo sapien
gtccaacaatgccaacggaacccaagtgaatca

SEQ ID NO: 1061311 - DNA, 33 bp, Homo sapien; identical to SEQ ID NO: 1061309

SEQ ID NO: 1061312 - DNA, 33 bp, Homo sapien; identical to SEQ ID NO: 1061310

SEQ ID NO: 1061313 - DNA, 33 bp, Homo sapien
ggaggacgctattctaagtgaaataaaacaggc

SEQ ID NO: 1061314 - DNA, 33 bp, Homo sapien
ggaggacgctattctacgtgaaataaaacaggc

SEQ ID NO: 1061315 - DNA, 33 bp, Homo sapien
gtggaaaatccagataagcttgtgtttttttct

SEQ ID NO: 1061316 - DNA, 33 bp, Homo sapien
gtggaaaatccagataggcttgtgtttttttct

SEQ ID NO: 1061317 - DNA, 33 bp, Homo sapien
ggtgtactactgagtagctctgctagttattca

SEQ ID NO: 1061318 - DNA, 33 bp, Homo sapien
ggtgtactactgagtatctctgctagttattca

SEQ ID NO: 1061319 - DNA, 33 bp, Homo sapien
atattcttctgttttacacaagcctgtcaatat

SEQ ID NO: 1061320 - DNA, 33 bp, Homo sapien
atattcttctgttttatacaagcctgtcaatat

SEQ ID NO: 1061321 - DNA, 33 bp, Homo sapien
aaaacttggaatccgacgttagagggtaggaag

SEQ ID NO: 1061322 - DNA, 33 bp, Homo sapien
aaaacttggaatccgatgttagagggtaggaag

SEQ ID NO: 1061323 - DNA, 33 bp, Homo sapien
aacatatatatgaggcaaaatttattaactcac

SEQ ID NO: 1061324 - DNA, 33 bp, Homo sapien
aacatatatatgaggcgaaatttattaactcac

SEQ ID NO: 1061325 - DNA, 33 bp, Homo sapien
aatttgtttattctggccagttcatataaatga

SEQ ID NO: 1061326 - DNA, 33 bp, Homo sapien
aatttgtttattctggtcagttcatataaatga

SEQ ID NO: 1061327 - DNA, 33 bp, Homo sapien
ctaatgttttttacaaagagttacataggcaac

SEQ ID NO: 1061328 - DNA, 33 bp, Homo sapien
ctaatgttttttacaatgagttacataggcaac

SEQ ID NO: 1061329 - DNA, 33 bp, Homo sapien
atacatttagtctagccaggtcttcctgttgaa

SEQ ID NO: 1061330 - DNA, 33 bp, Homo sapien
atacatttagtctagctaggtcttcctgttgaa

SEQ ID NO: 1061331 - DNA, 33 bp, Homo sapien
ccataatgaccacaccaatttccaatcccagca

SEQ ID NO: 1061332 - DNA, 33 bp, Homo sapien
ccataatgaccacaccgatttccaatcccagca

SEQ ID NO: 1061333 - DNA, 33 bp, Homo sapien
ttgcactctgtataccagcagaattgccaccac

SEQ ID NO: 1061334 - DNA, 33 bp, Homo sapien
ttgcactctgtataccggcagaattgccaccac

SEQ ID NO: 1061335 - DNA, 33 bp, Homo sapien
ttcagataattccctgaagatcctaaggttcta

SEQ ID NO: 1061336 - DNA, 33 bp, Homo sapien
ttcagataattccctggagatcctaaggttcta

SEQ ID NO: 1061337 - DNA, 33 bp, Homo sapien
ccactcatgacttgagaaagcagattacttttc

SEQ ID NO: 1061338 - DNA, 33 bp, Homo sapien
ccactcatgacttgaggaagcagattacttttc

SEQ ID NO: 1061339 - DNA, 33 bp, Homo sapien
ttctctttttaaacaacttcccatgagcagaaa

SEQ ID NO: 1061340 - DNA, 33 bp, Homo sapien
ttctctttttaaacaagttcccatgagcagaaa

SEQ ID NO: 1061341 - DNA, 33 bp, Homo sapien
tgcagtgcttaatgcaacaaggaaatcctgcaa

SEQ ID NO: 1061342 - DNA, 33 bp, Homo sapien
tgcagtgcttaatgcagcaaggaaatcctgcaa

SEQ ID NO: 1061343 - DNA, 33 bp, Homo sapien
cactctccaaagcttacaggctaaaacagctga

SEQ ID NO: 1061344 - DNA, 33 bp, Homo sapien
cactctccaaagcttataggctaaaacagctga

SEQ ID NO: 1061345 - DNA, 33 bp, Homo sapien
taaacgatctgacagacctaaaaaacacactac

SEQ ID NO: 1061346 - DNA, 33 bp, Homo sapien
taaacgatctgacagagctaaaaaacacactac

SEQ ID NO: 1061347 - DNA, 33 bp, Homo sapien
cacaaaattataagaaccctagaatacaaccta

SEQ ID NO: 1061348 - DNA, 33 bp, Homo sapien
cacaaaattataagaatcctagaatacaaccta

SEQ ID NO: 1061349 - DNA, 33 bp, Homo sapien
atatatttctttgatacgtactgggatggccct

SEQ ID NO: 1061350 - DNA, 33 bp, Homo sapien
atatatttctttgatatgtactgggatggccct

SEQ ID NO: 1061351 - DNA, 33 bp, Homo sapien
caacctctgatcttaacccagacgtttctttca

SEQ ID NO: 1061352 - DNA, 33 bp, Homo sapien
caacctctgatcttaatccagacgtttctttca

SEQ ID NO: 1061353 - DNA, 33 bp, Homo sapien
tttggatatgtgcctaagagaaggtttgcttgt

SEQ ID NO: 1061354 - DNA, 33 bp, Homo sapien
tttggatatgtgcctaggagaaggtttgcttgt

SEQ ID NO: 1061355 - DNA, 33 bp, Homo sapien
atttcctttctttcggacatatatctagcaatg

SEQ ID NO: 1061356 - DNA, 33 bp, Homo sapien
atttcctttctttcgggcatatatctagcaatg

SEQ ID NO: 1061357 - DNA, 33 bp, Homo sapien
aaagaccatgattaaaaagtcaaaaaacaatag

SEQ ID NO: 1061358 - DNA, 33 bp, Homo sapien
aaagaccatgattaaacagtcaaaaaacaatag

SEQ ID NO: 1061359 - DNA, 33 bp, Homo sapien
tatttgcctaggccaacgtacaaaagtgttttt

SEQ ID NO: 1061360 - DNA, 33 bp, Homo sapien
tatttgcctaggccaaggtacaaaagtgttttt

SEQ ID NO: 1061361 - DNA, 33 bp, Homo sapien
tgtctaccttgttgaaggtttttactataaagg

SEQ ID NO: 1061362 - DNA, 33 bp, Homo sapien
tgtctaccttgttgaatgtttttactataaagg

SEQ ID NO: 1061363 - DNA, 33 bp, Homo sapien
gagaacacatgtgtctaatcttagctatctgaa

SEQ ID NO: 1061364 - DNA, 33 bp, Homo sapien
gagaacacatgtgtctgatcttagctatctgaa

SEQ ID NO: 1061365 - DNA, 33 bp, Homo sapien
tgtgtgttatcatgtacgtgcatattttgttct

SEQ ID NO: 1061366 - DNA, 33 bp, Homo sapien
tgtgtgttatcatgtatgtgcatattttgttct

SEQ ID NO: 1061367 - DNA, 33 bp, Homo sapien
cagagacatggataaaattggaagccattatcc

SEQ ID NO: 1061368 - DNA, 33 bp, Homo sapien
cagagacatggataaagttggaagccattatcc

SEQ ID NO: 1061369 - DNA, 33 bp, Homo sapien
aagttggactgcactacacttcaacaaaaactc

SEQ ID NO: 1061370 - DNA, 33 bp, Homo sapien
aagttggactgcactatacttcaacaaaaactc

SEQ ID NO: 1061371 - DNA, 33 bp, Homo sapien
atttccagtgaccaaacgtattcatgatgtaac

SEQ ID NO: 1061372 - DNA, 33 bp, Homo sapien
atttccagtgaccaaatgtattcatgatgtaac

SEQ ID NO: 1061373 - DNA, 33 bp, Homo sapien
tgttatttccaagtacgggtttgcatgcatgaa

SEQ ID NO: 1061374 - DNA, 33 bp, Homo sapien
tgttatttccaagtactggtttgcatgcatgaa

SEQ ID NO: 1061375 - DNA, 33 bp, Homo sapien
atgtaaataattacaaagaaactacagcaactc

SEQ ID NO: 1061376 - DNA, 33 bp, Homo sapien
atgtaaataattacaatgaaactacagcaactc

SEQ ID NO: 1061377 - DNA, 33 bp, Homo sapien
tcgcgacctaaattaccaagtcaagattcaagc

SEQ ID NO: 1061378 - DNA, 33 bp, Homo sapien
tcgcgacctaaattactaagtcaagattcaagc

SEQ ID NO: 1061379 - DNA, 33 bp, Homo sapien
tatatgcgggaagaagcctaagtgcaagtggca

SEQ ID NO: 1061380 - DNA, 33 bp, Homo sapien
tatatgcgggaagaaggctaagtgcaagtggca

SEQ ID NO: 1061381 - DNA, 33 bp, Homo sapien
aacgggcccaacagagacaagttgatgtttggt

SEQ ID NO: 1061382 - DNA, 33 bp, Homo sapien
aacgggcccaacagagtcaagttgatgtttggt

SEQ ID NO: 1061383 - DNA, 33 bp, Homo sapien
agtctgctgaactgaaacaaagcaaccatatca

SEQ ID NO: 1061384 - DNA, 33 bp, Homo sapien
agtctgctgaactgaagcaaagcaaccatatca

SEQ ID NO: 1061385 - DNA, 33 bp, Homo sapien
ctaagtctatcaaaacaccaaatataggcaaac

SEQ ID NO: 1061386 - DNA, 33 bp, Homo sapien
ctaagtctatcaaaacgccaaatataggcaaac

SEQ ID NO: 1061387 - DNA, 33 bp, Homo sapien
tagactcacaaaataaacagctgcagtgaagtg

SEQ ID NO: 1061388 - DNA, 33 bp, Homo sapien
tagactcacaaaataaccagctgcagtgaagtg

SEQ ID NO: 1061389 - DNA, 33 bp, Homo sapien
catgggtaggtctctaaaagcccatccaataca

SEQ ID NO: 1061390 - DNA, 33 bp, Homo sapien
catgggtaggtctctagaagcccatccaataca

SEQ ID NO: 1061391 - DNA, 33 bp, Homo sapien
aacaaatttagagagccgaggaaaatataaaag

SEQ ID NO: 1061392 - DNA, 33 bp, Homo sapien
aacaaatttagagagctgaggaaaatataaaag

SEQ ID NO: 1061393 - DNA, 33 bp, Homo sapien
tttcagccatggcaaaatgtttcctaatgggag

SEQ ID NO: 1061394 - DNA, 33 bp, Homo sapien
tttcagccatggcaaagtgtttcctaatgggag

SEQ ID NO: 1061395 - DNA, 33 bp, Homo sapien
tctcagcactaaatcactactatttactgaaag

SEQ ID NO: 1061396 - DNA, 33 bp, Homo sapien
tctcagcactaaatcattactatttactgaaag

SEQ ID NO: 1061397 - DNA, 33 bp, Homo sapien
aactcttcttggaaaccgctttatctcagcact

SEQ ID NO: 1061398 - DNA, 33 bp, Homo sapien
aactcttcttggaaactgctttatctcagcact

SEQ ID NO: 1061399 - DNA, 33 bp, Homo sapien
gtcaagttgtagtaaccgactaatctcaggggc

SEQ ID NO: 1061400 - DNA, 33 bp, Homo sapien
gtcaagttgtagtaactgactaatctcaggggc

SEQ ID NO: 1061401 - DNA, 33 bp, Homo sapien
atatacattttaggtacgtttatatcctggcat

SEQ ID NO: 1061402 - DNA, 33 bp, Homo sapien
atatacattttaggtaggtttatatcctggcat

SEQ ID NO: 1061403 - DNA, 33 bp, Homo sapien
atctttacccaaaaacgatgctgttaacgttta

SEQ ID NO: 1061404 - DNA, 33 bp, Homo sapien
atctttacccaaaaactatgctgttaacgttta

SEQ ID NO: 1061405 - DNA, 33 bp, Homo sapien
aaagaactaaggctaaatcttcaaaacattcaa

SEQ ID NO: 1061406 - DNA, 33 bp, Homo sapien
aaagaactaaggctaactcttcaaaacattcaa

SEQ ID NO: 1061407 - DNA, 33 bp, Homo sapien
acaaaattgatcaagcagaaagatttagtgatc

SEQ ID NO: 1061408 - DNA, 33 bp, Homo sapien
acaaaattgatcaagcggaaagatttagtgatc

SEQ ID NO: 1061409 - DNA, 33 bp, Homo sapien
gcaagctgttattggaactaacattctttcttc

SEQ ID NO: 1061410 - DNA, 33 bp, Homo sapien
gcaagctgttattggatctaacattctttcttc

SEQ ID NO: 1061411 - DNA, 33 bp, Homo sapien
gttacttccaagatacaatgaaggcacagacat

SEQ ID NO: 1061412 - DNA, 33 bp, Homo sapien
gttacttccaagatacgatgaaggcacagacat

SEQ ID NO: 1061413 - DNA, 33 bp, Homo sapien
aggagttaaagggaacaaatctagtgtcaaaga

SEQ ID NO: 1061414 - DNA, 33 bp, Homo sapien
aggagttaaagggaacgaatctagtgtcaaaga

SEQ ID NO: 1061415 - DNA, 33 bp, Homo sapien
ttcaagaccacatacacgctgaagtcaatatcc

SEQ ID NO: 1061416 - DNA, 33 bp, Homo sapien
ttcaagaccacatacatgctgaagtcaatatcc

SEQ ID NO: 1061417 - DNA, 33 bp, Homo sapien
tagtggaatttgttcacggatcaatcttgcagt

SEQ ID NO: 1061418 - DNA, 33 bp, Homo sapien
tagtggaatttgttcatggatcaatcttgcagt

SEQ ID NO: 1061419 - DNA, 33 bp, Homo sapien
cattggtgcctccctagcacgtaaaatatctgg

SEQ ID NO: 1061420 - DNA, 33 bp, Homo sapien
cattggtgcctccctatcacgtaaaatatctgg

SEQ ID NO: 1061421 - DNA, 33 bp, Homo sapien
agaaactgatttcaaaagtctccactaatggca

SEQ ID NO: 1061422 - DNA, 33 bp, Homo sapien
agaaactgatttcaaaggtctccactaatggca

SEQ ID NO: 1061423 - DNA, 33 bp, Homo sapien
aaggtttcctgtcaaacagaaattatatgtctt

SEQ ID NO: 1061424 - DNA, 33 bp, Homo sapien
aaggtttcctgtcaaagagaaattatatgtctt

SEQ ID NO: 1061425 - DNA, 33 bp, Homo sapien
ttttgtcactgtagaactctaacatgggatcca

SEQ ID NO: 1061426 - DNA, 33 bp, Homo sapien
ttttgtcactgtagaagtctaacatgggatcca

SEQ ID NO: 1061427 - DNA, 33 bp, Homo sapien
tcaatttcttactggaacaattttgggagtgtg

SEQ ID NO: 1061428 - DNA, 33 bp, Homo sapien
tcaatttcttactggatcaattttgggagtgtg

SEQ ID NO: 1061429 - DNA, 33 bp, Homo sapien
ccgcatcaggacctcacgggccttccggatgcc

SEQ ID NO: 1061430 - DNA, 33 bp, Homo sapien
ccgcatcaggacctcatgggccttccggatgcc

SEQ ID NO: 1061431 - DNA, 33 bp, Homo sapien
tggacctaaggatattcaactgtgtaccaggaa

SEQ ID NO: 1061432 - DNA, 33 bp, Homo sapien
tggacctaaggatattgaactgtgtaccaggaa

SEQ ID NO: 1061433 - DNA, 33 bp, Homo sapien
agatcgttttactataccacaagttccatgctc

SEQ ID NO: 1061434 - DNA, 33 bp, Homo sapien
agatcgttttactatatcacaagttccatgctc

SEQ ID NO: 1061435 - DNA, 33 bp, Homo sapien
attcttacttgcgtgaaggcatcagagagcaat

SEQ ID NO: 1061436 - DNA, 33 bp, Homo sapien
attcttacttgcgtgacggcatcagagagcaat

SEQ ID NO: 1061437 - DNA, 33 bp, Homo sapien
atgtcagtgggcaaaaaataaagagtatgtcat

SEQ ID NO: 1061438 - DNA, 33 bp, Homo sapien
atgtcagtgggcaaaagataaagagtatgtcat

SEQ ID NO: 1061439 - DNA, 33 bp, Homo sapien
ctgtgaataagaggatcactgtacattgagaga

SEQ ID NO: 1061440 - DNA, 33 bp, Homo sapien
ctgtgaataagaggattactgtacattgagaga

SEQ ID NO: 1061441 - DNA, 33 bp, Homo sapien
tgtgaggaatataagcaaggctacatgacagta

SEQ ID NO: 1061442 - DNA, 33 bp, Homo sapien
tgtgaggaatataagcgaggctacatgacagta

SEQ ID NO: 1061443 - DNA, 33 bp, Homo sapien
gtgctcaggaccatcaatagcttccaatctcag

SEQ ID NO: 1061444 - DNA, 33 bp, Homo sapien
gtgctcaggaccatcagtagcttccaatctcag

SEQ ID NO: 1061445 - DNA, 33 bp, Homo sapien
aacagggcaatcaatcaacataattttagccag

SEQ ID NO: 1061446 - DNA, 33 bp, Homo sapien
aacagggcaatcaatcgacataattttagccag

SEQ ID NO: 1061447 - DNA, 33 bp, Homo sapien
cctaaccgaactttaggagatagttatcattac

SEQ ID NO: 1061448 - DNA, 33 bp, Homo sapien
cctaaccgaactttagtagatagttatcattac

SEQ ID NO: 1061449 - DNA, 33 bp, Homo sapien
gctgcttgttctctcaaaaataaactgctcttc

SEQ ID NO: 1061450 - DNA, 33 bp, Homo sapien
gctgcttgttctctcacaaataaactgctcttc

SEQ ID NO: 1061451 - DNA, 33 bp, Homo sapien
gaaactaactctaaaacctgtggttaccaagaa

SEQ ID NO: 1061452 - DNA, 33 bp, Homo sapien
gaaactaactctaaaatctgtggttaccaagaa

SEQ ID NO: 1061453 - DNA, 33 bp, Homo sapien
acatgtggccaacaggcaaatgaaaaaaaagct

SEQ ID NO: 1061454 - DNA, 33 bp, Homo sapien
acatgtggccaacaggtaaatgaaaaaaaagct

SEQ ID NO: 1061455 - DNA, 33 bp, Homo sapien
ggcaaagatttggtaacgaggatgccaaaggca

SEQ ID NO: 1061456 - DNA, 33 bp, Homo sapien
ggcaaagatttggtaatgaggatgccaaaggca

SEQ ID NO: 1061457 - DNA, 33 bp, Homo sapien
ttatctgctcatgcaacataaacaaagtgggta

SEQ ID NO: 1061458 - DNA, 33 bp, Homo sapien
ttatctgctcatgcaatataaacaaagtgggta

SEQ ID NO: 1061459 - DNA, 33 bp, Homo sapien
ttcttcagctctatcaggttggttatgttcttc

SEQ ID NO: 1061460 - DNA, 33 bp, Homo sapien
ttcttcagctctatcatgttggttatgttcttc

SEQ ID NO: 1061461 - DNA, 33 bp, Homo sapien
aacacaattagaaatgacaagagcgatattacc

SEQ ID NO: 1061462 - DNA, 33 bp, Homo sapien
aacacaattagaaatggcaagagcgatattacc

SEQ ID NO: 1061463 - DNA, 33 bp, Homo sapien
gtttcaatagtatttacgctttgcagtatgtca

SEQ ID NO: 1061464 - DNA, 33 bp, Homo sapien
gtttcaatagtatttatgctttgcagtatgtca

SEQ ID NO: 1061465 - DNA, 33 bp, Homo sapien
aggatagacgaatatgaaaaaggaagttgatta

SEQ ID NO: 1061466 - DNA, 33 bp, Homo sapien
aggatagacgaatatgtaaaaggaagttgatta

SEQ ID NO: 1061467 - DNA, 33 bp, Homo sapien
ccactggcactgcccaatgaagcattttggctc

SEQ ID NO: 1061468 - DNA, 33 bp, Homo sapien
ccactggcactgcccagtgaagcattttggctc

SEQ ID NO: 1061469 - DNA, 33 bp, Homo sapien
ttattgcaactaaagccgagtgtaacacctttg

SEQ ID NO: 1061470 - DNA, 33 bp, Homo sapien
ttattgcaactaaagctgagtgtaacacctttg

SEQ ID NO: 1061471 - DNA, 33 bp, Homo sapien
tgctctaattgacataggttccttgattcggta

SEQ ID NO: 1061472 - DNA, 33 bp, Homo sapien
tgctctaattgacatatgttccttgattcggta

SEQ ID NO: 1061473 - DNA, 33 bp, Homo sapien
atttttaatttttgacaaggagtttacatgaaa

SEQ ID NO: 1061474 - DNA, 33 bp, Homo sapien
atttttaatttttgacgaggagtttacatgaaa

SEQ ID NO: 1061475 - DNA, 33 bp, Homo sapien
ttcaaactatcctacaatctacagttaccaaaa

SEQ ID NO: 1061476 - DNA, 33 bp, Homo sapien
ttcaaactatcctacagtctacagttaccaaaa

SEQ ID NO: 1061477 - DNA, 33 bp, Homo sapien
tcggggtacgtgtgcaagtttgttacacagata

SEQ ID NO: 1061478 - DNA, 33 bp, Homo sapien
tcggggtacgtgtgcaggtttgttacacagata

SEQ ID NO: 1061479 - DNA, 33 bp, Homo sapien
ctactcacttctgaacaggaacatgtaatgcca

SEQ ID NO: 1061480 - DNA, 33 bp, Homo sapien
ctactcacttctgaaccggaacatgtaatgcca

SEQ ID NO: 1061481 - DNA, 33 bp, Homo sapien
cctactgagatcacaaataaatcttgacatcat

SEQ ID NO: 1061482 - DNA, 33 bp, Homo sapien
cctactgagatcacaattaaatcttgacatcat

SEQ ID NO: 1061483 - DNA, 33 bp, Homo sapien
atataagctatgcatacaattaagaacaataag

SEQ ID NO: 1061484 - DNA, 33 bp, Homo sapien
atataagctatgcatagaattaagaacaataag

SEQ ID NO: 1061485 - DNA, 33 bp, Homo sapien
taggtagttgagtatcagaaaagtgaatatgga

SEQ ID NO: 1061486 - DNA, 33 bp, Homo sapien
taggtagttgagtatcggaaaagtgaatatgga

SEQ ID NO: 1061487 - DNA, 33 bp, Homo sapien
gcagtcatgtcaggaccagacattgtggatgag

SEQ ID NO: 1061488 - DNA, 33 bp, Homo sapien
gcagtcatgtcaggactagacattgtggatgag

SEQ ID NO: 1061489 - DNA, 33 bp, Homo sapien
tataggatgtagtttaaaaagtgcttggaggaa

SEQ ID NO: 1061490 - DNA, 33 bp, Homo sapien
tataggatgtagtttagaaagtgcttggaggaa

SEQ ID NO: 1061491 - DNA, 33 bp, Homo sapien
taggggtatccattacgctctaatcactgtgta

SEQ ID NO: 1061492 - DNA, 33 bp, Homo sapien
taggggtatccattactctctaatcactgtgta

SEQ ID NO: 1061493 - DNA, 33 bp, Homo sapien
gccattttgccacacccggatggaccatgtttt

SEQ ID NO: 1061494 - DNA, 33 bp, Homo sapien
gccattttgccacacctggatggaccatgtttt

SEQ ID NO: 1061495 - DNA, 33 bp, Homo sapien
aatacctctatgcacaaaagccagaaaacttag

SEQ ID NO: 1061496 - DNA, 33 bp, Homo sapien
aatacctctatgcacacaagccagaaaacttag

SEQ ID NO: 1061497 - DNA, 33 bp, Homo sapien
cattttatcaatttaaactttgtgcatttgata

SEQ ID NO: 1061498 - DNA, 33 bp, Homo sapien
cattttatcaatttaacctttgtgcatttgata

SEQ ID NO: 1061499 - DNA, 33 bp, Homo sapien
gtatagccatccctcaagtgtgtttcattgtag

SEQ ID NO: 1061500 - DNA, 33 bp, Homo sapien
gtatagccatccctcacgtgtgtttcattgtag

SEQ ID NO: 1061501 - DNA, 33 bp, Homo sapien
aattggatttagaaggaagaacggaaggtttag

SEQ ID NO: 1061502 - DNA, 33 bp, Homo sapien
aattggatttagaaggcagaacggaaggtttag

SEQ ID NO: 1061503 - DNA, 33 bp, Homo sapien
gtacagttcagtggcactaattaccttcataac

SEQ ID NO: 1061504 - DNA, 33 bp, Homo sapien
gtacagttcagtggcattaattaccttcataac

SEQ ID NO: 1061505 - DNA, 33 bp, Homo sapien
tgccaggagaagtctaggggcgtgagatccacc

SEQ ID NO: 1061506 - DNA, 33 bp, Homo sapien
tgccaggagaagtctatgggcgtgagatccacc

SEQ ID NO: 1061507 - DNA, 33 bp, Homo sapien
tttaaataaaggccaccgtatctgaattcagac

SEQ ID NO: 1061508 - DNA, 33 bp, Homo sapien
tttaaataaaggccactgtatctgaattcagac

SEQ ID NO: 1061509 - DNA, 33 bp, Homo sapien
agaaaaacaagcgcaaatattcacccacacata

SEQ ID NO: 1061510 - DNA, 33 bp, Homo sapien
agaaaaacaagcgcaagtattcacccacacata

SEQ ID NO: 1061511 - DNA, 33 bp, Homo sapien
cccattaacatgaaaaatcacataactctatct

SEQ ID NO: 1061512 - DNA, 33 bp, Homo sapien
cccattaacatgaaaagtcacataactctatct

SEQ ID NO: 1061513 - DNA, 33 bp, Homo sapien
gcaatagaacactgaactagaagtcaagagaac

SEQ ID NO: 1061514 - DNA, 33 bp, Homo sapien
gcaatagaacactgaagtagaagtcaagagaac

SEQ ID NO: 1061515 - DNA, 33 bp, Homo sapien
aacctgatgagtttaccggaaacttttatcaac

SEQ ID NO: 1061516 - DNA, 33 bp, Homo sapien
aacctgatgagtttactggaaacttttatcaac

SEQ ID NO: 1061517 - DNA, 33 bp, Homo sapien
ttatttcaagttttcaaagcctaggactatgtt

SEQ ID NO: 1061518 - DNA, 33 bp, Homo sapien
ttatttcaagttttcagagcctaggactatgtt

SEQ ID NO: 1061519 - DNA, 33 bp, Homo sapien
gtgcttccatgtgaaaattacccattggctttt

SEQ ID NO: 1061520 - DNA, 33 bp, Homo sapien
gtgcttccatgtgaaagttacccattggctttt

SEQ ID NO: 1061521 - DNA, 33 bp, Homo sapien
ttttttttttcctagcagaacatatagaagaaa

SEQ ID NO: 1061522 - DNA, 33 bp, Homo sapien
ttttttttttcctagcggaacatatagaagaaa

SEQ ID NO: 1061523 - DNA, 33 bp, Homo sapien
atatatctttgattgacggttctgaattgagga

SEQ ID NO: 1061524 - DNA, 33 bp, Homo sapien
atatatctttgattgatggttctgaattgagga

SEQ ID NO: 1061525 - DNA, 33 bp, Homo sapien
cttctgagatgatagcacaagaagctcagagat

SEQ ID NO: 1061526 - DNA, 33 bp, Homo sapien
cttctgagatgatagcgcaagaagctcagagat

SEQ ID NO: 1061527 - DNA, 33 bp, Homo sapien
aatgctgctatgtataataaggtgtaaagtttt

SEQ ID NO: 1061528 - DNA, 33 bp, Homo sapien
aatgctgctatgtatattaaggtgtaaagtttt

SEQ ID NO: 1061529 - DNA, 33 bp, Homo sapien
tgacttaaaactataccgcaaggctccagtaac

SEQ ID NO: 1061530 - DNA, 33 bp, Homo sapien
tgacttaaaactatactgcaaggctccagtaac

SEQ ID NO: 1061531 - DNA, 33 bp, Homo sapien
tctgcactgacaactacaaatctttgatgtcag

SEQ ID NO: 1061532 - DNA, 33 bp, Homo sapien
tctgcactgacaactataaatctttgatgtcag

SEQ ID NO: 1061533 - DNA, 33 bp, Homo sapien
tcctcatgactgaatcaccttttaaagctctct

SEQ ID NO: 1061534 - DNA, 33 bp, Homo sapien
tcctcatgactgaatcgccttttaaagctctct

SEQ ID NO: 1061535 - DNA, 33 bp, Homo sapien
tactttggcaggaatacgaactgagtttagaac

SEQ ID NO: 1061536 - DNA, 33 bp, Homo sapien
tactttggcaggaatatgaactgagtttagaac

SEQ ID NO: 1061537 - DNA, 33 bp, Homo sapien
gtgtttcctaaattggacagttaagtttggagg

SEQ ID NO: 1061538 - DNA, 33 bp, Homo sapien
gtgtttcctaaattggccagttaagtttggagg

SEQ ID NO: 1061539 - DNA, 33 bp, Homo sapien
cttaaagttgttaaacagggcaaagcattttaa

SEQ ID NO: 1061540 - DNA, 33 bp, Homo sapien
cttaaagttgttaaacggggcaaagcattttaa

SEQ ID NO: 1061541 - DNA, 33 bp, Homo sapien
attttctgtgatcagcagaccttatttatgctc

SEQ ID NO: 1061542 - DNA, 33 bp, Homo sapien
attttctgtgatcagctgaccttatttatgctc

SEQ ID NO: 1061543 - DNA, 33 bp, Homo sapien
taaattgttctattataaactcacatgcataca

SEQ ID NO: 1061544 - DNA, 33 bp, Homo sapien
taaattgttctattatgaactcacatgcataca

SEQ ID NO: 1061545 - DNA, 33 bp, Homo sapien
agaacttttaatgataacctgaatgtatgtgtc

SEQ ID NO: 1061546 - DNA, 33 bp, Homo sapien
agaacttttaatgatagcctgaatgtatgtgtc

SEQ ID NO: 1061547 - DNA, 33 bp, Homo sapien
tgcaccctgtacttgtaaaagctgcagagagtc

SEQ ID NO: 1061548 - DNA, 33 bp, Homo sapien
tgcaccctgtacttgtgaaagctgcagagagtc

SEQ ID NO: 1061549 - DNA, 33 bp, Homo sapien
tttgtctcccttgtgcaaaactgggtaagtcca

SEQ ID NO: 1061550 - DNA, 33 bp, Homo sapien
tttgtctcccttgtgcgaaactgggtaagtcca

SEQ ID NO: 1061551 - DNA, 33 bp, Homo sapien
taccataatgaagacaagatggtattggtataa

SEQ ID NO: 1061552 - DNA, 33 bp, Homo sapien
taccataatgaagacaggatggtattggtataa

SEQ ID NO: 1061553 - DNA, 33 bp, Homo sapien
gtcaaggtagtgttaccgggaattttgtattgg

SEQ ID NO: 1061554 - DNA, 33 bp, Homo sapien
gtcaaggtagtgttactgggaattttgtattgg

SEQ ID NO: 1061555 - DNA, 33 bp, Homo sapien
gggatggattttttaaatgaggagatcaacaca

SEQ ID NO: 1061556 - DNA, 33 bp, Homo sapien
gggatggattttttaactgaggagatcaacaca

SEQ ID NO: 1061557 - DNA, 33 bp, Homo sapien
tgacaaaatgctcttaccttaatagagtactgc

SEQ ID NO: 1061558 - DNA, 33 bp, Homo sapien
tgacaaaatgctcttatcttaatagagtactgc

SEQ ID NO: 1061559 - DNA, 33 bp, Homo sapien
tctcatggtagtgactaaatctgaaaagttctg

SEQ ID NO: 1061560 - DNA, 33 bp, Homo sapien
tctcatggtagtgacttaatctgaaaagttctg

SEQ ID NO: 1061561 - DNA, 33 bp, Homo sapien
aacaaaaaaatccgaaaggcagcaacttcaaag

SEQ ID NO: 1061562 - DNA, 33 bp, Homo sapien
aacaaaaaaatccgaagggcagcaacttcaaag

SEQ ID NO: 1061563 - DNA, 33 bp, Homo sapien
agacttgaggtttgtaccctttgaagcaatgac

SEQ ID NO: 1061564 - DNA, 33 bp, Homo sapien
agacttgaggtttgtatcctttgaagcaatgac

SEQ ID NO: 1061565 - DNA, 33 bp, Homo sapien
atggattgttgaaggacgcttaaggtggagaaa

SEQ ID NO: 1061566 - DNA, 33 bp, Homo sapien
atggattgttgaaggatgcttaaggtggagaaa

SEQ ID NO: 1061567 - DNA, 33 bp, Homo sapien; identical to SEQ ID NO: 1061565

SEQ ID NO: 1061568 - DNA, 33 bp, Homo sapien; identical to SEQ ID NO: 1061566

SEQ ID NO: 1061569 - DNA, 33 bp, Homo sapien
tacttggaaagacagaagaagatccagtagttg

SEQ ID NO: 1061570 - DNA, 33 bp, Homo sapien
tacttggaaagacagacgaagatccagtagttg

SEQ ID NO: 1061571 - DNA, 33 bp, Homo sapien
tgtaattataacttaactgtgcattttacagta

SEQ ID NO: 1061572 - DNA, 33 bp, Homo sapien
tgtaattataacttaattgtgcattttacagta

SEQ ID NO: 1061573 - DNA, 33 bp, Homo sapien
agtatgtttctccaacggtcaatatttataaca

SEQ ID NO: 1061574 - DNA, 33 bp, Homo sapien
agtatgtttctccaactgtcaatatttataaca

SEQ ID NO: 1061575 - DNA, 33 bp, Homo sapien
aacaacagtagattccagaaggtagaccacaga

SEQ ID NO: 1061576 - DNA, 33 bp, Homo sapien
aacaacagtagattccggaaggtagaccacaga

SEQ ID NO: 1061577 - DNA, 33 bp, Homo sapien
gtcttccagaaattaaactgagagacatgggtg

SEQ ID NO: 1061578 - DNA, 33 bp, Homo sapien
gtcttccagaaattaacctgagagacatgggtg

SEQ ID NO: 1061579 - DNA, 33 bp, Homo sapien
ctgcagtagacccaaaaaaacaaggccagtcca

SEQ ID NO: 1061580 - DNA, 33 bp, Homo sapien
ctgcagtagacccaaagaaacaaggccagtcca

SEQ ID NO: 1061581 - DNA, 33 bp, Homo sapien
ctctttctttctgaacaaatctctactaatttg

SEQ ID NO: 1061582 - DNA, 33 bp, Homo sapien
ctctttctttctgaaccaatctctactaatttg

SEQ ID NO: 1061583 - DNA, 33 bp, Homo sapien
cattacattgctcaatcataccagcagcttgta

SEQ ID NO: 1061584 - DNA, 33 bp, Homo sapien
cattacattgctcaattataccagcagcttgta

SEQ ID NO: 1061585 - DNA, 33 bp, Homo sapien
cttgtggttgtttttacagccatcagcacatgt

SEQ ID NO: 1061586 - DNA, 33 bp, Homo sapien
cttgtggttgtttttatagccatcagcacatgt

SEQ ID NO: 1061587 - DNA, 33 bp, Homo sapien
taaaatacagaaaaaacttatgctgacaattct

SEQ ID NO: 1061588 - DNA, 33 bp, Homo sapien
taaaatacagaaaaaatttatgctgacaattct

SEQ ID NO: 1061589 - DNA, 33 bp, Homo sapien
catccattccttgtgaagtagaacactgcatgg

SEQ ID NO: 1061590 - DNA, 33 bp, Homo sapien
catccattccttgtgatgtagaacactgcatgg

SEQ ID NO: 1061591 - DNA, 33 bp, Homo sapien
tcctaggaattaaataacaccatcgtggaccaa

SEQ ID NO: 1061592 - DNA, 33 bp, Homo sapien
tcctaggaattaaataccaccatcgtggaccaa

SEQ ID NO: 1061593 - DNA, 33 bp, Homo sapien
agctctgaggaagtgtaaagatgctgactagaa

SEQ ID NO: 1061594 - DNA, 33 bp, Homo sapien
agctctgaggaagtgtcaagatgctgactagaa

SEQ ID NO: 1061595 - DNA, 33 bp, Homo sapien
gtttgcattttcttaacgattactgatattgac

SEQ ID NO: 1061596 - DNA, 33 bp, Homo sapien
gtttgcattttcttaatgattactgatattgac

SEQ ID NO: 1061597 - DNA, 33 bp, Homo sapien
gtcgcccgggtagtgcagatagtagacaatagg

SEQ ID NO: 1061598 - DNA, 33 bp, Homo sapien
gtcgcccgggtagtgcggatagtagacaatagg

SEQ ID NO: 1061599 - DNA, 33 bp, Homo sapien
ctctacctttaggactcacctgtgtttgtacat

SEQ ID NO: 1061600 - DNA, 33 bp, Homo sapien
ctctacctttaggacttacctgtgtttgtacat

SEQ ID NO: 1061601 - DNA, 33 bp, Homo sapien
gttttgcaaaagtttagagtggtagctgaccag

SEQ ID NO: 1061602 - DNA, 33 bp, Homo sapien
gttttgcaaaagtttatagtggtagctgaccag

SEQ ID NO: 1061603 - DNA, 33 bp, Homo sapien
ctgaaggagtttaaaaacacaagaccagcctca

SEQ ID NO: 1061604 - DNA, 33 bp, Homo sapien
ctgaaggagtttaaaatcacaagaccagcctca

SEQ ID NO: 1061605 - DNA, 33 bp, Homo sapien
tatcacatatatttgacactttgtttgcagaca

SEQ ID NO: 1061606 - DNA, 33 bp, Homo sapien
tatcacatatatttgatactttgtttgcagaca

SEQ ID NO: 1061607 - DNA, 33 bp, Homo sapien
atgtaattctgaggtgcacattacaaaagccta

SEQ ID NO: 1061608 - DNA, 33 bp, Homo sapien
atgtaattctgaggtgtacattacaaaagccta

SEQ ID NO: 1061609 - DNA, 33 bp, Homo sapien
cacaaataacataacagggaaggtgagtaaaac

SEQ ID NO: 1061610 - DNA, 33 bp, Homo sapien
cacaaataacataacatggaaggtgagtaaaac

SEQ ID NO: 1061611 - DNA, 33 bp, Homo sapien
tctgtttcttagtctgaataaggcttgtaaatt

SEQ ID NO: 1061612 - DNA, 33 bp, Homo sapien
tctgtttcttagtctggataaggcttgtaaatt

SEQ ID NO: 1061613 - DNA, 33 bp, Homo sapien
tacaaataagcccatacggtgaagactacaata

SEQ ID NO: 1061614 - DNA, 33 bp, Homo sapien
tacaaataagcccatatggtgaagactacaata

SEQ ID NO: 1061615 - DNA, 33 bp, Homo sapien
atcacagccattcaacactcacttggtttttca

SEQ ID NO: 1061616 - DNA, 33 bp, Homo sapien
atcacagccattcaactctcacttggtttttca

SEQ ID NO: 1061617 - DNA, 33 bp, Homo sapien
tgtaataagctcaacccgaaaaaaataatagca

SEQ ID NO: 1061618 - DNA, 33 bp, Homo sapien
tgtaataagctcaacctgaaaaaaataatagca

SEQ ID NO: 1061619 - DNA, 33 bp, Homo sapien
gtagctatagtccagacggcataggacctgtta

SEQ ID NO: 1061620 - DNA, 33 bp, Homo sapien
gtagctatagtccagatggcataggacctgtta

SEQ ID NO: 1061621 - DNA, 33 bp, Homo sapien
gatcaaaaggagaagaagttaatgttggctata

SEQ ID NO: 1061622 - DNA, 33 bp, Homo sapien
gatcaaaaggagaagaggttaatgttggctata

SEQ ID NO: 1061623 - DNA, 33 bp, Homo sapien
gctagttaaaaactaacattttgcctgagttgt

SEQ ID NO: 1061624 - DNA, 33 bp, Homo sapien
gctagttaaaaactaatattttgcctgagttgt

SEQ ID NO: 1061625 - DNA, 33 bp, Homo sapien
atggtaaaccttggtcagaaaatgctacatcac

SEQ ID NO: 1061626 - DNA, 33 bp, Homo sapien
atggtaaaccttggtcggaaaatgctacatcac

SEQ ID NO: 1061627 - DNA, 33 bp, Homo sapien
ctggcatccatagcaaagaatgttcaggttaaa

SEQ ID NO: 1061628 - DNA, 33 bp, Homo sapien
ctggcatccatagcaaggaatgttcaggttaaa

SEQ ID NO: 1061629 - DNA, 33 bp, Homo sapien
aaaaattctaaaagtcaataagaacgagctaaa

SEQ ID NO: 1061630 - DNA, 33 bp, Homo sapien
aaaaattctaaaagtcgataagaacgagctaaa

SEQ ID NO: 1061631 - DNA, 33 bp, Homo sapien
aaaatacacttctgacaaggcagtaatttcctc

SEQ ID NO: 1061632 - DNA, 33 bp, Homo sapien
aaaatacacttctgacgaggcagtaatttcctc

SEQ ID NO: 1061633 - DNA, 33 bp, Homo sapien
tgtccctattctttccactatttaatgcttatc

SEQ ID NO: 1061634 - DNA, 33 bp, Homo sapien
tgtccctattctttcctctatttaatgcttatc

SEQ ID NO: 1061635 - DNA, 33 bp, Homo sapien
gtgtacaattcctccaagtatagacactcacgg

SEQ ID NO: 1061636 - DNA, 33 bp, Homo sapien
gtgtacaattcctccaggtatagacactcacgg

SEQ ID NO: 1061637 - DNA, 33 bp, Homo sapien
agagctgttcacagaaatctttaggatgctgag

SEQ ID NO: 1061638 - DNA, 33 bp, Homo sapien
agagctgttcacagaactctttaggatgctgag

SEQ ID NO: 1061639 - DNA, 33 bp, Homo sapien
tcccagctcatccttacggcttcatggagagtt

SEQ ID NO: 1061640 - DNA, 33 bp, Homo sapien
tcccagctcatccttatggcttcatggagagtt

SEQ ID NO: 1061641 - DNA, 33 bp, Homo sapien
tctattaacgaagccaccttactgttcaaatta

SEQ ID NO: 1061642 - DNA, 33 bp, Homo sapien
tctattaacgaagccatcttactgttcaaatta

SEQ ID NO: 1061643 - DNA, 33 bp, Homo sapien
gattagtgtttcaccaagtcctgaaatacattt

SEQ ID NO: 1061644 - DNA, 33 bp, Homo sapien
gattagtgtttcaccacgtcctgaaatacattt

SEQ ID NO: 1061645 - DNA, 33 bp, Homo sapien
gcctattcaagtatcactaatggccaccagctg

SEQ ID NO: 1061646 - DNA, 33 bp, Homo sapien
gcctattcaagtatcattaatggccaccagctg

SEQ ID NO: 1061647 - DNA, 33 bp, Homo sapien
aaaggtagatcccaaaactaagaaactactaga

SEQ ID NO: 1061648 - DNA, 33 bp, Homo sapien
aaaggtagatcccaaagctaagaaactactaga

SEQ ID NO: 1061649 - DNA, 33 bp, Homo sapien
ccattgaactggagaaaatatttgcagactctt

SEQ ID NO: 1061650 - DNA, 33 bp, Homo sapien
ccattgaactggagaagatatttgcagactctt

SEQ ID NO: 1061651 - DNA, 33 bp, Homo sapien
cagctgtgcttatacaacttgtacttgagctat

SEQ ID NO: 1061652 - DNA, 33 bp, Homo sapien
cagctgtgcttatacatcttgtacttgagctat

SEQ ID NO: 1061653 - DNA, 33 bp, Homo sapien
ttgggtagagaacctacagacaactgacagacc

SEQ ID NO: 1061654 - DNA, 33 bp, Homo sapien
ttgggtagagaacctatagacaactgacagacc

SEQ ID NO: 1061655 - DNA, 33 bp, Homo sapien
gtgccaagtgtcccccaatatcattgccctctc

SEQ ID NO: 1061656 - DNA, 33 bp, Homo sapien
gtgccaagtgtcccccgatatcattgccctctc

SEQ ID NO: 1061657 - DNA, 33 bp, Homo sapien
atacagtcagttgaccaccaacacaaatgaaaa

SEQ ID NO: 1061658 - DNA, 33 bp, Homo sapien
atacagtcagttgacctccaacacaaatgaaaa

SEQ ID NO: 1061659 - DNA, 33 bp, Homo sapien
agtagctgcaattataagtggatgccatcaggc

SEQ ID NO: 1061660 - DNA, 33 bp, Homo sapien
agtagctgcaattataggtggatgccatcaggc

SEQ ID NO: 1061661 - DNA, 33 bp, Homo sapien
gagctaaaaacaaagacggataactaaatgaaa

SEQ ID NO: 1061662 - DNA, 33 bp, Homo sapien
gagctaaaaacaaagatggataactaaatgaaa

SEQ ID NO: 1061663 - DNA, 33 bp, Homo sapien
ggtttgacacctaatacaacatggggaaagtgg

SEQ ID NO: 1061664 - DNA, 33 bp, Homo sapien
ggtttgacacctaatataacatggggaaagtgg

SEQ ID NO: 1061665 - DNA, 33 bp, Homo sapien
gcacattaaaaatagaaagagcattactggaaa

SEQ ID NO: 1061666 - DNA, 33 bp, Homo sapien
gcacattaaaaatagagagagcattactggaaa

SEQ ID NO: 1061667 - DNA, 33 bp, Homo sapien
agaaaatggacttataacattcaaagaaaaaaa

SEQ ID NO: 1061668 - DNA, 33 bp, Homo sapien
agaaaatggacttataccattcaaagaaaaaaa

SEQ ID NO: 1061669 - DNA, 33 bp, Homo sapien
gaagatagcagtcctgccacattatgtggggca

SEQ ID NO: 1061670 - DNA, 33 bp, Homo sapien
gaagatagcagtcctgtcacattatgtggggca

SEQ ID NO: 1061671 - DNA, 33 bp, Homo sapien
ttcacaatagccaaaagttggaaacaccccaaa

SEQ ID NO: 1061672 - DNA, 33 bp, Homo sapien
ttcacaatagccaaaatttggaaacaccccaaa

SEQ ID NO: 1061673 - DNA, 33 bp, Homo sapien
aaatagtcatgcttacaaacatataaacaatga

SEQ ID NO: 1061674 - DNA, 33 bp, Homo sapien
aaatagtcatgcttaccaacatataaacaatga

SEQ ID NO: 1061675 - DNA, 33 bp, Homo sapien
caagaaaaaatattcaagtgtttagcagtgtct

SEQ ID NO: 1061676 - DNA, 33 bp, Homo sapien
caagaaaaaatattcacgtgtttagcagtgtct

SEQ ID NO: 1061677 - DNA, 33 bp, Homo sapien
ttcttctgaaaggtccactgatagtctaatgga

SEQ ID NO: 1061678 - DNA, 33 bp, Homo sapien
ttcttctgaaaggtccgctgatagtctaatgga

SEQ ID NO: 1061679 - DNA, 33 bp, Homo sapien
cagttaaatgcataggacactgacacactaaag

SEQ ID NO: 1061680 - DNA, 33 bp, Homo sapien
cagttaaatgcataggtcactgacacactaaag

SEQ ID NO: 1061681 - DNA, 33 bp, Homo sapien
tagacaactagctagacgaataaagaaaacaga

SEQ ID NO: 1061682 - DNA, 33 bp, Homo sapien
tagacaactagctagaggaataaagaaaacaga

SEQ ID NO: 1061683 - DNA, 33 bp, Homo sapien
tgagtggagaggattccgaaagacagtagcttc

SEQ ID NO: 1061684 - DNA, 33 bp, Homo sapien
tgagtggagaggattctgaaagacagtagcttc

SEQ ID NO: 1061685 - DNA, 33 bp, Homo sapien
ctatcagcctgaggtgacaatttaacaatgttg

SEQ ID NO: 1061686 - DNA, 33 bp, Homo sapien
ctatcagcctgaggtgtcaatttaacaatgttg

SEQ ID NO: 1061687 - DNA, 33 bp, Homo sapien
gtaaatgacattgaaactcctgtatatggtatg

SEQ ID NO: 1061688 - DNA, 33 bp, Homo sapien
gtaaatgacattgaaattcctgtatatggtatg

SEQ ID NO: 1061689 - DNA, 33 bp, Homo sapien
gcactcagggtaggaaaagcataccagtgtaaa

SEQ ID NO: 1061690 - DNA, 33 bp, Homo sapien
gcactcagggtaggaagagcataccagtgtaaa

SEQ ID NO: 1061691 - DNA, 33 bp, Homo sapien
aagtcactagtcatacaatataatctccattgt

SEQ ID NO: 1061692 - DNA, 33 bp, Homo sapien
aagtcactagtcatacgatataatctccattgt

SEQ ID NO: 1061693 - DNA, 33 bp, Homo sapien
gtaccagcttggccaccgaagggtacaaataga

SEQ ID NO: 1061694 - DNA, 33 bp, Homo sapien
gtaccagcttggccactgaagggtacaaataga

SEQ ID NO: 1061695 - DNA, 33 bp, Homo sapien
gtcgctaataatacacacagcctaagctactga

SEQ ID NO: 1061696 - DNA, 33 bp, Homo sapien
gtcgctaataatacacgcagcctaagctactga

SEQ ID NO: 1061697 - DNA, 33 bp, Homo sapien
aaacttcatatgggaacaaaaaatagcctgcat

SEQ ID NO: 1061698 - DNA, 33 bp, Homo sapien
aaacttcatatgggaataaaaaatagcctgcat

SEQ ID NO: 1061699 - DNA, 33 bp, Homo sapien
gtacagacgttatagaaaatgaattagagttag

SEQ ID NO: 1061700 - DNA, 33 bp, Homo sapien
gtacagacgttatagagaatgaattagagttag

SEQ ID NO: 1061701 - DNA, 33 bp, Homo sapien
ctggtcatcagtgcgacaaatgggttaaggaac

SEQ ID NO: 1061702 - DNA, 33 bp, Homo sapien
ctggtcatcagtgcgataaatgggttaaggaac

SEQ ID NO: 1061703 - DNA, 33 bp, Homo sapien
gctatgatgaaagccacgtagaagtactttggt

SEQ ID NO: 1061704 - DNA, 33 bp, Homo sapien
gctatgatgaaagccatgtagaagtactttggt

SEQ ID NO: 1061705 - DNA, 33 bp, Homo sapien
aagttgctcttggcagcatggctattacactga

SEQ ID NO: 1061706 - DNA, 33 bp, Homo sapien
aagttgctcttggcagtatggctattacactga

SEQ ID NO: 1061707 - DNA, 33 bp, Homo sapien
atatttttcagttgtcaaggaattaaagcacat

SEQ ID NO: 1061708 - DNA, 33 bp, Homo sapien
atatttttcagttgtcgaggaattaaagcacat

SEQ ID NO: 1061709 - DNA, 33 bp, Homo sapien
tggctcatagttaaaaacatcatctctccttac

SEQ ID NO: 1061710 - DNA, 33 bp, Homo sapien
tggctcatagttaaaagcatcatctctccttac

SEQ ID NO: 1061711 - DNA, 33 bp, Homo sapien
ggtaactaaagcataacaatcattgtcaaagat

SEQ ID NO: 1061712 - DNA, 33 bp, Homo sapien
ggtaactaaagcataataatcattgtcaaagat

SEQ ID NO: 1061713 - DNA, 33 bp, Homo sapien
cacatttgctatttagccaagtcatttattgtt

SEQ ID NO: 1061714 - DNA, 33 bp, Homo sapien
cacatttgctatttagtcaagtcatttattgtt

SEQ ID NO: 1061715 - DNA, 33 bp, Homo sapien
tttaaatgtttcttaacgctccacaaggcagat

SEQ ID NO: 1061716 - DNA, 33 bp, Homo sapien
tttaaatgtttcttaatgctccacaaggcagat

SEQ ID NO: 1061717 - DNA, 33 bp, Homo sapien
tagagtcattaattacactgggtttcctcaaac

SEQ ID NO: 1061718 - DNA, 33 bp, Homo sapien
tagagtcattaattactctgggtttcctcaaac

SEQ ID NO: 1061719 - DNA, 33 bp, Homo sapien
atatttaagaattagcagaagtgaaaaatcttt

SEQ ID NO: 1061720 - DNA, 33 bp, Homo sapien
atatttaagaattagctgaagtgaaaaatcttt

SEQ ID NO: 1061721 - DNA, 33 bp, Homo sapien
atgtggagcctagagaatccggtgcgggagcat

SEQ ID NO: 1061722 - DNA, 33 bp, Homo sapien
atgtggagcctagagagtccggtgcgggagcat

SEQ ID NO: 1061723 - DNA, 33 bp, Homo sapien
ttagccagtgcagtaactcaagaaaatggtcca

SEQ ID NO: 1061724 - DNA, 33 bp, Homo sapien
ttagccagtgcagtaattcaagaaaatggtcca

SEQ ID NO: 1061725 - DNA, 33 bp, Homo sapien
atgtgcagtcacatacaaaaaaaatcccattga

SEQ ID NO: 1061726 - DNA, 33 bp, Homo sapien
atgtgcagtcacataccaaaaaaatcccattga

SEQ ID NO: 1061727 - DNA, 33 bp, Homo sapien
cctgtcctcactctcaactgattagcctcttat

SEQ ID NO: 1061728 - DNA, 33 bp, Homo sapien
cctgtcctcactctcagctgattagcctcttat

SEQ ID NO: 1061729 - DNA, 33 bp, Homo sapien
tattttccgttaaaacagtgcaagttagcgaag

SEQ ID NO: 1061730 - DNA, 33 bp, Homo sapien
tattttccgttaaaaccgtgcaagttagcgaag

SEQ ID NO: 1061731 - DNA, 33 bp, Homo sapien
tattgagcaatacattaaaaactttattcatct

SEQ ID NO: 1061732 - DNA, 33 bp, Homo sapien
tattgagcaatacattgaaaactttattcatct

SEQ ID NO: 1061733 - DNA, 33 bp, Homo sapien
agtatgtgagttttcacagtgtacaaaaaaaga

SEQ ID NO: 1061734 - DNA, 33 bp, Homo sapien
agtatgtgagttttcatagtgtacaaaaaaaga

SEQ ID NO: 1061735 - DNA, 33 bp, Homo sapien
ttaggtgagtatgaggccaccagtttggccagt

SEQ ID NO: 1061736 - DNA, 33 bp, Homo sapien
ttaggtgagtatgaggtcaccagtttggccagt

SEQ ID NO: 1061737 - DNA, 33 bp, Homo sapien
tttctcaagcctggaacatagtgcatagctctt

SEQ ID NO: 1061738 - DNA, 33 bp, Homo sapien
tttctcaagcctggaatatagtgcatagctctt

SEQ ID NO: 1061739 - DNA, 33 bp, Homo sapien
tccagaatgaagaaaaattagttgattaaatga

SEQ ID NO: 1061740 - DNA, 33 bp, Homo sapien
tccagaatgaagaaaacttagttgattaaatga

SEQ ID NO: 1061741 - DNA, 33 bp, Homo sapien
tagtatcatcaaaaaaaatcctcctcgcagaca

SEQ ID NO: 1061742 - DNA, 33 bp, Homo sapien
tagtatcatcaaaaaacatcctcctcgcagaca

SEQ ID NO: 1061743 - DNA, 33 bp, Homo sapien
tcatatcagccaaaacaaatctttcattttctt

SEQ ID NO: 1061744 - DNA, 33 bp, Homo sapien
tcatatcagccaaaacgaatctttcattttctt

SEQ ID NO: 1061745 - DNA, 33 bp, Homo sapien
gcttgtatatgttgacaagggccactttgctga

SEQ ID NO: 1061746 - DNA, 33 bp, Homo sapien
gcttgtatatgttgacgagggccactttgctga

SEQ ID NO: 1061747 - DNA, 33 bp, Homo sapien
taggttgtctttactacaaaaatgctgtaataa

SEQ ID NO: 1061748 - DNA, 33 bp, Homo sapien
taggttgtctttactataaaaatgctgtaataa

SEQ ID NO: 1061749 - DNA, 33 bp, Homo sapien
tgggctatagcaaaataacagggaaaagtaaat

SEQ ID NO: 1061750 - DNA, 33 bp, Homo sapien
tgggctatagcaaaatcacagggaaaagtaaat

SEQ ID NO: 1061751 - DNA, 33 bp, Homo sapien
accaaggacctatgcccaaacactacgtgagat

SEQ ID NO: 1061752 - DNA, 33 bp, Homo sapien
accaaggacctatgcctaaacactacgtgagat

SEQ ID NO: 1061753 - DNA, 33 bp, Homo sapien
ggctatttacccaaacaaaatgagaacagtata

SEQ ID NO: 1061754 - DNA, 33 bp, Homo sapien
ggctatttacccaaacgaaatgagaacagtata

SEQ ID NO: 1061755 - DNA, 33 bp, Homo sapien
tccagagtactctccccgcctctgcttgagagt

SEQ ID NO: 1061756 - DNA, 33 bp, Homo sapien
tccagagtactctccctgcctctgcttgagagt

SEQ ID NO: 1061757 - DNA, 33 bp, Homo sapien
cctacatcagcttacagtaaatcttccctgaac

SEQ ID NO: 1061758 - DNA, 33 bp, Homo sapien
cctacatcagcttacattaaatcttccctgaac

SEQ ID NO: 1061759 - DNA, 33 bp, Homo sapien
agagaatgagtcacaaaattacacagtagacat

SEQ ID NO: 1061760 - DNA, 33 bp, Homo sapien
agagaatgagtcacaagattacacagtagacat

SEQ ID NO: 1061761 - DNA, 33 bp, Homo sapien
tacaatcatgtgactacagttagtaatttgttg

SEQ ID NO: 1061762 - DNA, 33 bp, Homo sapien
tacaatcatgtgactatagttagtaatttgttg

SEQ ID NO: 1061763 - DNA, 33 bp, Homo sapien
ttatttggaggtggcaaaacataccttagattg

SEQ ID NO: 1061764 - DNA, 33 bp, Homo sapien
ttatttggaggtggcacaacataccttagattg

SEQ ID NO: 1061765 - DNA, 33 bp, Homo sapien
tatttgagaagttaacagagatgcaaggattaa

SEQ ID NO: 1061766 - DNA, 33 bp, Homo sapien
tatttgagaagttaacggagatgcaaggattaa

SEQ ID NO: 1061767 - DNA, 33 bp, Homo sapien
taaggttttattagtaaaagatgtccatgtgaa

SEQ ID NO: 1061768 - DNA, 33 bp, Homo sapien
taaggttttattagtacaagatgtccatgtgaa

SEQ ID NO: 1061769 - DNA, 33 bp, Homo sapien
atttacaactttatcaaaatatgtgatattcat

SEQ ID NO: 1061770 - DNA, 33 bp, Homo sapien
atttacaactttatcagaatatgtgatattcat

SEQ ID NO: 1061771 - DNA, 33 bp, Homo sapien
gggtgaaatatatggcaagctccatgtggtgat

SEQ ID NO: 1061772 - DNA, 33 bp, Homo sapien
gggtgaaatatatggccagctccatgtggtgat

SEQ ID NO: 1061773 - DNA, 33 bp, Homo sapien
tcatttaactcaaaacgcagggactcattctcc

SEQ ID NO: 1061774 - DNA, 33 bp, Homo sapien
tcatttaactcaaaactcagggactcattctcc

SEQ ID NO: 1061775 - DNA, 33 bp, Homo sapien
aggacatacattttagaatccaacaactttctg

SEQ ID NO: 1061776 - DNA, 33 bp, Homo sapien
aggacatacattttaggatccaacaactttctg

SEQ ID NO: 1061777 - DNA, 33 bp, Homo sapien
aaatagagtatatgaccagcacagttttcacat

SEQ ID NO: 1061778 - DNA, 33 bp, Homo sapien
aaatagagtatatgactagcacagttttcacat

SEQ ID NO: 1061779 - DNA, 33 bp, Homo sapien
aatactgaaggaaataactaaaagtggaaagtg

SEQ ID NO: 1061780 - DNA, 33 bp, Homo sapien
aatactgaaggaaatatctaaaagtggaaagtg

SEQ ID NO: 1061781 - DNA, 33 bp, Homo sapien
tcctagttgtgaaaaaatgacttaatctctctc

SEQ ID NO: 1061782 - DNA, 33 bp, Homo sapien
tcctagttgtgaaaaagtgacttaatctctctc

SEQ ID NO: 1061783 - DNA, 33 bp, Homo sapien
taaacctttcactatacaggatcattttgtcag

SEQ ID NO: 1061784 - DNA, 33 bp, Homo sapien
taaacctttcactatataggatcattttgtcag

SEQ ID NO: 1061785 - DNA, 33 bp, Homo sapien
aagtccagaaatttcacagaagagtcaagtcct

SEQ ID NO: 1061786 - DNA, 33 bp, Homo sapien
aagtccagaaatttcatagaagagtcaagtcct

SEQ ID NO: 1061787 - DNA, 33 bp, Homo sapien
taagtgtcagctgtggcagtatcagcagggtgg

SEQ ID NO: 1061788 - DNA, 33 bp, Homo sapien
taagtgtcagctgtggtagtatcagcagggtgg

SEQ ID NO: 1061789 - DNA, 33 bp, Homo sapien
gaactaggtctagtagaaagataaatattaata

SEQ ID NO: 1061790 - DNA, 33 bp, Homo sapien
gaactaggtctagtaggaagataaatattaata

SEQ ID NO: 1061791 - DNA, 33 bp, Homo sapien
ttcatgttgttcttgaaattcctgctccaactg

SEQ ID NO: 1061792 - DNA, 33 bp, Homo sapien
ttcatgttgttcttgagattcctgctccaactg

SEQ ID NO: 1061793 - DNA, 33 bp, Homo sapien
caccatactctctcaaatcaggttggcttacac

SEQ ID NO: 1061794 - DNA, 33 bp, Homo sapien
caccatactctctcaagtcaggttggcttacac

SEQ ID NO: 1061795 - DNA, 33 bp, Homo sapien
ctcacggaaacaatgcaacacagaaaacaatgg

SEQ ID NO: 1061796 - DNA, 33 bp, Homo sapien
ctcacggaaacaatgcgacacagaaaacaatgg

SEQ ID NO: 1061797 - DNA, 33 bp, Homo sapien
ctggatagttttaacaacagattagctactgca

SEQ ID NO: 1061798 - DNA, 33 bp, Homo sapien
ctggatagttttaacagcagattagctactgca

SEQ ID NO: 1061799 - DNA, 33 bp, Homo sapien
caactacataggggaaactcgaggactttatat

SEQ ID NO: 1061800 - DNA, 33 bp, Homo sapien
caactacataggggaacctcgaggactttatat

SEQ ID NO: 1061801 - DNA, 33 bp, Homo sapien
gctatttatggaataactagagaaggacagtgt

SEQ ID NO: 1061802 - DNA, 33 bp, Homo sapien
gctatttatggaataattagagaaggacagtgt

SEQ ID NO: 1061803 - DNA, 33 bp, Homo sapien
atactttagataatacaacaaagccatgaaccc

SEQ ID NO: 1061804 - DNA, 33 bp, Homo sapien
atactttagataatacgacaaagccatgaaccc

SEQ ID NO: 1061805 - DNA, 33 bp, Homo sapien
atggattttctgtagactatatgttaacttgct

SEQ ID NO: 1061806 - DNA, 33 bp, Homo sapien
atggattttctgtagattatatgttaacttgct

SEQ ID NO: 1061807 - DNA, 33 bp, Homo sapien
taggtgatattgccaactgaatatgttaagtgt

SEQ ID NO: 1061808 - DNA, 33 bp, Homo sapien
taggtgatattgccaattgaatatgttaagtgt

SEQ ID NO: 1061809 - DNA, 33 bp, Homo sapien
caatcaggggtattcaccattgaggtagaagaa

SEQ ID NO: 1061810 - DNA, 33 bp, Homo sapien
caatcaggggtattcatcattgaggtagaagaa

SEQ ID NO: 1061811 - DNA, 33 bp, Homo sapien
accatcctggggtctgaagaacattggcgcttt

SEQ ID NO: 1061812 - DNA, 33 bp, Homo sapien
accatcctggggtctggagaacattggcgcttt

SEQ ID NO: 1061813 - DNA, 33 bp, Homo sapien
atatcaggaaaggctactaagttaaggcttcaa

SEQ ID NO: 1061814 - DNA, 33 bp, Homo sapien
atatcaggaaaggctattaagttaaggcttcaa

SEQ ID NO: 1061815 - DNA, 33 bp, Homo sapien
ttgcccaaggttataacatccaaatggaagaaa

SEQ ID NO: 1061816 - DNA, 33 bp, Homo sapien
ttgcccaaggttataatatccaaatggaagaaa

SEQ ID NO: 1061817 - DNA, 33 bp, Homo sapien
tgagttcacagtactcaatttttgcaaatatta

SEQ ID NO: 1061818 - DNA, 33 bp, Homo sapien
tgagttcacagtactctatttttgcaaatatta

SEQ ID NO: 1061819 - DNA, 33 bp, Homo sapien
cctgattgaaaacctacgttgattgctctcccg

SEQ ID NO: 1061820 - DNA, 33 bp, Homo sapien
cctgattgaaaacctatgttgattgctctcccg

SEQ ID NO: 1061821 - DNA, 33 bp, Homo sapien
tcctccattcagtaaacatgaccattccttaac

SEQ ID NO: 1061822 - DNA, 33 bp, Homo sapien
tcctccattcagtaaatatgaccattccttaac

SEQ ID NO: 1061823 - DNA, 33 bp, Homo sapien
tgatattcttgtgtagaatcttgtagcatcctc

SEQ ID NO: 1061824 - DNA, 33 bp, Homo sapien
tgatattcttgtgtagcatcttgtagcatcctc

SEQ ID NO: 1061825 - DNA, 33 bp, Homo sapien
catgcagggaagactacgtctgctgaaacatga

SEQ ID NO: 1061826 - DNA, 33 bp, Homo sapien
catgcagggaagactaggtctgctgaaacatga

SEQ ID NO: 1061827 - DNA, 33 bp, Homo sapien
tgaggtggagtaaggaacaaatggaaactcttt

SEQ ID NO: 1061828 - DNA, 33 bp, Homo sapien
tgaggtggagtaaggagcaaatggaaactcttt

SEQ ID NO: 1061829 - DNA, 33 bp, Homo sapien
gggacaaaagagtacaaataagacatacaatag

SEQ ID NO: 1061830 - DNA, 33 bp, Homo sapien
gggacaaaagagtacatataagacatacaatag

SEQ ID NO: 1061831 - DNA, 33 bp, Homo sapien
agtgggaggtaagttacgaagatgcaaagacac

SEQ ID NO: 1061832 - DNA, 33 bp, Homo sapien
agtgggaggtaagttatgaagatgcaaagacac

SEQ ID NO: 1061833 - DNA, 33 bp, Homo sapien
gaatgaattagacttgcaaatgagctgaataag

SEQ ID NO: 1061834 - DNA, 33 bp, Homo sapien
gaatgaattagacttgtaaatgagctgaataag

SEQ ID NO: 1061835 - DNA, 33 bp, Homo sapien
agaatatacgtagacaatagaatttcagaaatc

SEQ ID NO: 1061836 - DNA, 33 bp, Homo sapien
agaatatacgtagacattagaatttcagaaatc

SEQ ID NO: 1061837 - DNA, 33 bp, Homo sapien
tatcagaaaataatgactcaatgtattactaca

SEQ ID NO: 1061838 - DNA, 33 bp, Homo sapien
tatcagaaaataatgattcaatgtattactaca

SEQ ID NO: 1061839 - DNA, 33 bp, Homo sapien
tacttgattacattcccaggattgtttccaggc

SEQ ID NO: 1061840 - DNA, 33 bp, Homo sapien
tacttgattacattcctaggattgtttccaggc

SEQ ID NO: 1061841 - DNA, 33 bp, Homo sapien
ttgtccaagtccatcaagatgatacctccataa

SEQ ID NO: 1061842 - DNA, 33 bp, Homo sapien
ttgtccaagtccatcaggatgatacctccataa

SEQ ID NO: 1061843 - DNA, 33 bp, Homo sapien
aacccatctaacccacaaagacattgctgtgcc

SEQ ID NO: 1061844 - DNA, 33 bp, Homo sapien
aacccatctaacccacgaagacattgctgtgcc

SEQ ID NO: 1061845 - DNA, 33 bp, Homo sapien
ccacattagggcagtaagtttttctagcctctc

SEQ ID NO: 1061846 - DNA, 33 bp, Homo sapien
ccacattagggcagtatgtttttctagcctctc

SEQ ID NO: 1061847 - DNA, 33 bp, Homo sapien
tggcaatagacaccaaattatgaacaggacctg

SEQ ID NO: 1061848 - DNA, 33 bp, Homo sapien
tggcaatagacaccaatttatgaacaggacctg

SEQ ID NO: 1061849 - DNA, 33 bp, Homo sapien
ttctctgggcctgttaactttctctttggggaa

SEQ ID NO: 1061850 - DNA, 33 bp, Homo sapien
ttctctgggcctgttatctttctctttggggaa

SEQ ID NO: 1061851 - DNA, 33 bp, Homo sapien
tacaatgtaagcctcaagaaaaacagtgaatca

SEQ ID NO: 1061852 - DNA, 33 bp, Homo sapien
tacaatgtaagcctcaggaaaaacagtgaatca

SEQ ID NO: 1061853 - DNA, 33 bp, Homo sapien
agatgtaaagagatacagaagaatgagtaagag

SEQ ID NO: 1061854 - DNA, 33 bp, Homo sapien
agatgtaaagagatacggaagaatgagtaagag

SEQ ID NO: 1061855 - DNA, 33 bp, Homo sapien
ttgcgttagaattagaatagtaaagaggaaaaa

SEQ ID NO: 1061856 - DNA, 33 bp, Homo sapien
ttgcgttagaattagagtagtaaagaggaaaaa

SEQ ID NO: 1061857 - DNA, 33 bp, Homo sapien
gggtacatctgatggaagaagaaaaataccagg

SEQ ID NO: 1061858 - DNA, 33 bp, Homo sapien
gggtacatctgatggaggaagaaaaataccagg

SEQ ID NO: 1061859 - DNA, 33 bp, Homo sapien
gccagtaaaaacaaaaaccattagccagaaagg

SEQ ID NO: 1061860 - DNA, 33 bp, Homo sapien
gccagtaaaaacaaaagccattagccagaaagg

SEQ ID NO: 1061861 - DNA, 33 bp, Homo sapien
tacagataacataaacagtgatccttatcattc

SEQ ID NO: 1061862 - DNA, 33 bp, Homo sapien
tacagataacataaactgtgatccttatcattc

SEQ ID NO: 1061863 - DNA, 33 bp, Homo sapien
tgaattgacaatgcaaagaaatccgtatgaagt

SEQ ID NO: 1061864 - DNA, 33 bp, Homo sapien
tgaattgacaatgcaatgaaatccgtatgaagt

SEQ ID NO: 1061865 - DNA, 33 bp, Homo sapien
actgtgcctcagacacaaactatgtccttagat

SEQ ID NO: 1061866 - DNA, 33 bp, Homo sapien
actgtgcctcagacactaactatgtccttagat

SEQ ID NO: 1061867 - DNA, 33 bp, Homo sapien
ttgatattatagtagaagctgaaccaccagatg

SEQ ID NO: 1061868 - DNA, 33 bp, Homo sapien
ttgatattatagtagaggctgaaccaccagatg

SEQ ID NO: 1061869 - DNA, 33 bp, Homo sapien
taacatagagtgcttacatttttggtatttgca

SEQ ID NO: 1061870 - DNA, 33 bp, Homo sapien
taacatagagtgcttatatttttggtatttgca

SEQ ID NO: 1061871 - DNA, 33 bp, Homo sapien
ggcaagttagcaaaaaagaactatgtttagcaa

SEQ ID NO: 1061872 - DNA, 33 bp, Homo sapien
ggcaagttagcaaaaaggaactatgtttagcaa

SEQ ID NO: 1061873 - DNA, 33 bp, Homo sapien
gatcaggatagagagcccagaagtaagactgca

SEQ ID NO: 1061874 - DNA, 33 bp, Homo sapien
gatcaggatagagagctcagaagtaagactgca

SEQ ID NO: 1061875 - DNA, 33 bp, Homo sapien
tatgttgctcaagtggaaaatagcctacaggat

SEQ ID NO: 1061876 - DNA, 33 bp, Homo sapien
tatgttgctcaagtgggaaatagcctacaggat

SEQ ID NO: 1061877 - DNA, 33 bp, Homo sapien
gaactcacaacatagaacaattggatctacagg

SEQ ID NO: 1061878 - DNA, 33 bp, Homo sapien
gaactcacaacatagaccaattggatctacagg

SEQ ID NO: 1061879 - DNA, 33 bp, Homo sapien
agaatcactttctacaactaacctgttaagatg

SEQ ID NO: 1061880 - DNA, 33 bp, Homo sapien
agaatcactttctacatctaacctgttaagatg

SEQ ID NO: 1061881 - DNA, 33 bp, Homo sapien
gttcatgagggtagatcagtccaataaagcagt

SEQ ID NO: 1061882 - DNA, 33 bp, Homo sapien
gttcatgagggtagattagtccaataaagcagt

SEQ ID NO: 1061883 - DNA, 33 bp, Homo sapien
ttaaaaatcttggctccaaaatatctatgtaac

SEQ ID NO: 1061884 - DNA, 33 bp, Homo sapien
ttaaaaatcttggctctaaaatatctatgtaac

SEQ ID NO: 1061885 - DNA, 33 bp, Homo sapien
aggactgtttaagaagccttaccaaatttgctg

SEQ ID NO: 1061886 - DNA, 33 bp, Homo sapien
aggactgtttaagaaggcttaccaaatttgctg

SEQ ID NO: 1061887 - DNA, 33 bp, Homo sapien
tcttgagattaagtatcaagctgtcattcagta

SEQ ID NO: 1061888 - DNA, 33 bp, Homo sapien
tcttgagattaagtattaagctgtcattcagta

SEQ ID NO: 1061889 - DNA, 33 bp, Homo sapien
tttgttattggattgcaattttttttagtattt

SEQ ID NO: 1061890 - DNA, 33 bp, Homo sapien
tttgttattggattgccattttttttagtattt

SEQ ID NO: 1061891 - DNA, 33 bp, Homo sapien
tcatttcactgacagaacattcttacaattaat

SEQ ID NO: 1061892 - DNA, 33 bp, Homo sapien
tcatttcactgacagagcattcttacaattaat

SEQ ID NO: 1061893 - DNA, 33 bp, Homo sapien
ttctcattggtctcccaggaagaataaactgtt

SEQ ID NO: 1061894 - DNA, 33 bp, Homo sapien
ttctcattggtctcccgggaagaataaactgtt

SEQ ID NO: 1061895 - DNA, 33 bp, Homo sapien
ctctggtttcaggcaactccttctgggtcctga

SEQ ID NO: 1061896 - DNA, 33 bp, Homo sapien
ctctggtttcaggcaattccttctgggtcctga

SEQ ID NO: 1061897 - DNA, 33 bp, Homo sapien; identical to SEQ ID NO: 1061895

SEQ ID NO: 1061898 - DNA, 33 bp, Homo sapien; identical to SEQ ID NO: 1061896

SEQ ID NO: 1061899 - DNA, 33 bp, Homo sapien
attatatagcaataaaaaagacttctcagagcc

SEQ ID NO: 1061900 - DNA, 33 bp, Homo sapien
attatatagcaataaataagacttctcagagcc

SEQ ID NO: 1061901 - DNA, 33 bp, Homo sapien
tgaacttccacatcaacagggcagaaatagatg

SEQ ID NO: 1061902 - DNA, 33 bp, Homo sapien
tgaacttccacatcaatagggcagaaatagatg

SEQ ID NO: 1061903 - DNA, 33 bp, Homo sapien
tgtgtcagaatcctggaatgtgatggaagcttg

SEQ ID NO: 1061904 - DNA, 33 bp, Homo sapien
tgtgtcagaatcctgggatgtgatggaagcttg

SEQ ID NO: 1061905 - DNA, 33 bp, Homo sapien
ggtaaggactgaagcacatctttttgtctgtat

SEQ ID NO: 1061906 - DNA, 33 bp, Homo sapien
ggtaaggactgaagcagatctttttgtctgtat

SEQ ID NO: 1061907 - DNA, 33 bp, Homo sapien
tgaagatacataacctaaatctagtgatgacga

SEQ ID NO: 1061908 - DNA, 33 bp, Homo sapien
tgaagatacataacctgaatctagtgatgacga

SEQ ID NO: 1061909 - DNA, 33 bp, Homo sapien
acttctatctaagaagaaacataggagctcagg

SEQ ID NO: 1061910 - DNA, 33 bp, Homo sapien
acttctatctaagaaggaacataggagctcagg

SEQ ID NO: 1061911 - DNA, 33 bp, Homo sapien
ttttttctaccagatacgctaggtcatcagatc

SEQ ID NO: 1061912 - DNA, 33 bp, Homo sapien
ttttttctaccagataggctaggtcatcagatc

SEQ ID NO: 1061913 - DNA, 33 bp, Homo sapien
agggtttaagtcgccacgaatgccattgcctcc

SEQ ID NO: 1061914 - DNA, 33 bp, Homo sapien
agggtttaagtcgccatgaatgccattgcctcc

SEQ ID NO: 1061915 - DNA, 33 bp, Homo sapien
agtgacaacaagcaaacggcaagaaaataagta

SEQ ID NO: 1061916 - DNA, 33 bp, Homo sapien
agtgacaacaagcaaatggcaagaaaataagta

SEQ ID NO: 1061917 - DNA, 33 bp, Homo sapien
tgttgcctattataaacaaaattttgtatatgt

SEQ ID NO: 1061918 - DNA, 33 bp, Homo sapien
tgttgcctattataaataaaattttgtatatgt

SEQ ID NO: 1061919 - DNA, 33 bp, Homo sapien
cactaactactgaaaaaatttcttgagagtttt

SEQ ID NO: 1061920 - DNA, 33 bp, Homo sapien
cactaactactgaaaacatttcttgagagtttt

SEQ ID NO: 1061921 - DNA, 33 bp, Homo sapien
gtttgctctctaataagaacattttctgcttaa

SEQ ID NO: 1061922 - DNA, 33 bp, Homo sapien
gtttgctctctaataataacattttctgcttaa

SEQ ID NO: 1061923 - DNA, 33 bp, Homo sapien
tggcggaaactgaagtgaatattttggaactct

SEQ ID NO: 1061924 - DNA, 33 bp, Homo sapien
tggcggaaactgaagttaatattttggaactct

SEQ ID NO: 1061925 - DNA, 33 bp, Homo sapien
tcaaatcaatgaatgccgaaaaaggtgtttgac

SEQ ID NO: 1061926 - DNA, 33 bp, Homo sapien
tcaaatcaatgaatgctgaaaaaggtgtttgac

SEQ ID NO: 1061927 - DNA, 33 bp, Homo sapien
gctccttgagggtagaaagagactgtaatccaa

SEQ ID NO: 1061928 - DNA, 33 bp, Homo sapien
gctccttgagggtagagagagactgtaatccaa

SEQ ID NO: 1061929 - DNA, 33 bp, Homo sapien
tgtaagaattgggttacctatccttttatggct

SEQ ID NO: 1061930 - DNA, 33 bp, Homo sapien
tgtaagaattgggttatctatccttttatggct

SEQ ID NO: 1061931 - DNA, 33 bp, Homo sapien
aatggacatgaaccaacggagtgcaagcctata

SEQ ID NO: 1061932 - DNA, 33 bp, Homo sapien
aatggacatgaaccaatggagtgcaagcctata

SEQ ID NO: 1061933 - DNA, 33 bp, Homo sapien
caaatcatgagacaacaaagtatgttacctgca

SEQ ID NO: 1061934 - DNA, 33 bp, Homo sapien
caaatcatgagacaacgaagtatgttacctgca

SEQ ID NO: 1061935 - DNA, 33 bp, Homo sapien
aagaaaggcatttgtagaatcttcatctagagc

SEQ ID NO: 1061936 - DNA, 33 bp, Homo sapien
aagaaaggcatttgtataatcttcatctagagc

SEQ ID NO: 1061937 - DNA, 33 bp, Homo sapien
tacatgatgtatcagacaaaaggagtgtgaggt

SEQ ID NO: 1061938 - DNA, 33 bp, Homo sapien
tacatgatgtatcagataaaaggagtgtgaggt

SEQ ID NO: 1061939 - DNA, 33 bp, Homo sapien
cgtattccaagcaatgacactactaaaatcaga

SEQ ID NO: 1061940 - DNA, 33 bp, Homo sapien
cgtattccaagcaatgccactactaaaatcaga

SEQ ID NO: 1061941 - DNA, 33 bp, Homo sapien
ctcagtaatctcatcaagactttatagggtggt

SEQ ID NO: 1061942 - DNA, 33 bp, Homo sapien
ctcagtaatctcatcaggactttatagggtggt

SEQ ID NO: 1061943 - DNA, 33 bp, Homo sapien
caaaaaataaggtgtactaatggatagataaag

SEQ ID NO: 1061944 - DNA, 33 bp, Homo sapien
caaaaaataaggtgtattaatggatagataaag

SEQ ID NO: 1061945 - DNA, 33 bp, Homo sapien
atgaatatattaaaaaatgccccaaatcactaa

SEQ ID NO: 1061946 - DNA, 33 bp, Homo sapien
atgaatatattaaaaagtgccccaaatcactaa

SEQ ID NO: 1061947 - DNA, 33 bp, Homo sapien
tacctcccgagtttgagatggtcactacttcca

SEQ ID NO: 1061948 - DNA, 33 bp, Homo sapien
tacctcccgagtttgatatggtcactacttcca

SEQ ID NO: 1061949 - DNA, 33 bp, Homo sapien
cctactctgactctagaacttacaatagcagcc

SEQ ID NO: 1061950 - DNA, 33 bp, Homo sapien
cctactctgactctagcacttacaatagcagcc

SEQ ID NO: 1061951 - DNA, 33 bp, Homo sapien
ctgtcaggttaacttacatgctgtgatctatac

SEQ ID NO: 1061952 - DNA, 33 bp, Homo sapien
ctgtcaggttaacttatatgctgtgatctatac

SEQ ID NO: 1061953 - DNA, 33 bp, Homo sapien
aaagaagggcttcagcgctaaagaaactttttg

SEQ ID NO: 1061954 - DNA, 33 bp, Homo sapien
aaagaagggcttcagctctaaagaaactttttg

SEQ ID NO: 1061955 - DNA, 33 bp, Homo sapien
tctctcacaaaatagacgagtgagactagaggc

SEQ ID NO: 1061956 - DNA, 33 bp, Homo sapien
tctctcacaaaatagatgagtgagactagaggc

SEQ ID NO: 1061957 - DNA, 33 bp, Homo sapien
ttggcatttgaattggaagaagtaaggattagt

SEQ ID NO: 1061958 - DNA, 33 bp, Homo sapien
ttggcatttgaattgggagaagtaaggattagt

SEQ ID NO: 1061959 - DNA, 33 bp, Homo sapien
cccaaccctgcattctcaagtgtgggccagtgt

SEQ ID NO: 1061960 - DNA, 33 bp, Homo sapien
cccaaccctgcattcttaagtgtgggccagtgt

SEQ ID NO: 1061961 - DNA, 33 bp, Homo sapien
aaccacagaaggcataaaataaccaaagctatc

SEQ ID NO: 1061962 - DNA, 33 bp, Homo sapien
aaccacagaaggcatataataaccaaagctatc

SEQ ID NO: 1061963 - DNA, 33 bp, Homo sapien
gaagctatacttacacgacataaaatggacttt

SEQ ID NO: 1061964 - DNA, 33 bp, Homo sapien
gaagctatacttacactacataaaatggacttt

SEQ ID NO: 1061965 - DNA, 33 bp, Homo sapien
gttcatctcagggataagttggaactctgaaag

SEQ ID NO: 1061966 - DNA, 33 bp, Homo sapien
gttcatctcagggatatgttggaactctgaaag

SEQ ID NO: 1061967 - DNA, 33 bp, Homo sapien
ggtggggcttgctggaaaacccagctggaagga

SEQ ID NO: 1061968 - DNA, 33 bp, Homo sapien
ggtggggcttgctggagaacccagctggaagga

SEQ ID NO: 1061969 - DNA, 33 bp, Homo sapien
cttcccttcttttctcaaatatactgaggtcag

SEQ ID NO: 1061970 - DNA, 33 bp, Homo sapien
cttcccttcttttctcgaatatactgaggtcag

SEQ ID NO: 1061971 - DNA, 33 bp, Homo sapien
agtgtattagaaaaaactgcaaaacattaacat

SEQ ID NO: 1061972 - DNA, 33 bp, Homo sapien
agtgtattagaaaaaattgcaaaacattaacat

SEQ ID NO: 1061973 - DNA, 33 bp, Homo sapien
accataacatctcataagtatagcacaaattgc

SEQ ID NO: 1061974 - DNA, 33 bp, Homo sapien
accataacatctcataggtatagcacaaattgc

SEQ ID NO: 1061975 - DNA, 33 bp, Homo sapien
atgaaactttctcataactctctagtcaaagat

SEQ ID NO: 1061976 - DNA, 33 bp, Homo sapien
atgaaactttctcatatctctctagtcaaagat

SEQ ID NO: 1061977 - DNA, 33 bp, Homo sapien
tatcaagggccttgtagaatagacaaaggaagt

SEQ ID NO: 1061978 - DNA, 33 bp, Homo sapien
tatcaagggccttgtataatagacaaaggaagt

SEQ ID NO: 1061979 - DNA, 33 bp, Homo sapien
tgtattgcctacctcaagttttccaaaaatgtt

SEQ ID NO: 1061980 - DNA, 33 bp, Homo sapien
tgtattgcctacctcaggttttccaaaaatgtt

SEQ ID NO: 1061981 - DNA, 33 bp, Homo sapien
agccaaccaaatgcaaatgccctgctgttggat

SEQ ID NO: 1061982 - DNA, 33 bp, Homo sapien
agccaaccaaatgcaagtgccctgctgttggat

SEQ ID NO: 1061983 - DNA, 33 bp, Homo sapien
atgttgaaaatagatactactgatggctataca

SEQ ID NO: 1061984 - DNA, 33 bp, Homo sapien
atgttgaaaatagatagtactgatggctataca

SEQ ID NO: 1061985 - DNA, 33 bp, Homo sapien
tatcaatgtctcttcaagctccagtacctaaaa

SEQ ID NO: 1061986 - DNA, 33 bp, Homo sapien
tatcaatgtctcttcaggctccagtacctaaaa

SEQ ID NO: 1061987 - DNA, 33 bp, Homo sapien
attagttctcattcacaacattttttttcctgt

SEQ ID NO: 1061988 - DNA, 33 bp, Homo sapien
attagttctcattcacgacattttttttcctgt

SEQ ID NO: 1061989 - DNA, 33 bp, Homo sapien
agttttattggttaccagaagtattatcacaaa

SEQ ID NO: 1061990 - DNA, 33 bp, Homo sapien
agttttattggttaccggaagtattatcacaaa

SEQ ID NO: 1061991 - DNA, 33 bp, Homo sapien
tatagtctaatgtaaccgaagagagtttccaga

SEQ ID NO: 1061992 - DNA, 33 bp, Homo sapien
tatagtctaatgtaactgaagagagtttccaga

SEQ ID NO: 1061993 - DNA, 33 bp, Homo sapien
tttctcaaatatgctaaaagacaaagactgtaa

SEQ ID NO: 1061994 - DNA, 33 bp, Homo sapien
tttctcaaatatgctagaagacaaagactgtaa

SEQ ID NO: 1061995 - DNA, 33 bp, Homo sapien
aagggtgagggcctaactgaatgcgactggtgt

SEQ ID NO: 1061996 - DNA, 33 bp, Homo sapien
aagggtgagggcctaattgaatgcgactggtgt

SEQ ID NO: 1061997 - DNA, 33 bp, Homo sapien
gaacctatgttttgcacagtacattaatttgaa

SEQ ID NO: 1061998 - DNA, 33 bp, Homo sapien
gaacctatgttttgcagagtacattaatttgaa

SEQ ID NO: 1061999 - DNA, 33 bp, Homo sapien
tcaaagtgtctactaacctgtgcttctgaaagg

SEQ ID NO: 1062000 - DNA, 33 bp, Homo sapien
tcaaagtgtctactaatctgtgcttctgaaagg

SEQ ID NO: 1062001 - DNA, 33 bp, Homo sapien
gagatagagagataacaaagaaattgaaatctc

SEQ ID NO: 1062002 - DNA, 33 bp, Homo sapien
gagatagagagataacgaagaaattgaaatctc

SEQ ID NO: 1062003 - DNA, 33 bp, Homo sapien
agtctcactaagggaaacagataaataaatttt

SEQ ID NO: 1062004 - DNA, 33 bp, Homo sapien
agtctcactaagggaagcagataaataaatttt

SEQ ID NO: 1062005 - DNA, 33 bp, Homo sapien
atcttactgtttcaatgactttagcttttctct

SEQ ID NO: 1062006 - DNA, 33 bp, Homo sapien
atcttactgtttcaattactttagcttttctct

SEQ ID NO: 1062007 - DNA, 33 bp, Homo sapien
gacatgaacacgtgtaagtggttaaggagcaaa

SEQ ID NO: 1062008 - DNA, 33 bp, Homo sapien
gacatgaacacgtgtaggtggttaaggagcaaa

SEQ ID NO: 1062009 - DNA, 33 bp, Homo sapien
cactggttgagcattagtaatccaaatatctga

SEQ ID NO: 1062010 - DNA, 33 bp, Homo sapien
cactggttgagcattattaatccaaatatctga

SEQ ID NO: 1062011 - DNA, 33 bp, Homo sapien
tctttacctttcagaaaactacagaatgtgaga

SEQ ID NO: 1062012 - DNA, 33 bp, Homo sapien
tctttacctttcagaagactacagaatgtgaga

SEQ ID NO: 1062013 - DNA, 33 bp, Homo sapien
ttgagagatatttttgcaactgaattctatttt

SEQ ID NO: 1062014 - DNA, 33 bp, Homo sapien
ttgagagatatttttggaactgaattctatttt

SEQ ID NO: 1062015 - DNA, 33 bp, Homo sapien
tctgattacttttccaaaaggcaggtacactgt

SEQ ID NO: 1062016 - DNA, 33 bp, Homo sapien
tctgattacttttccataaggcaggtacactgt

SEQ ID NO: 1062017 - DNA, 33 bp, Homo sapien
tttatcagctggacaccgtcatgggggctattt

SEQ ID NO: 1062018 - DNA, 33 bp, Homo sapien
tttatcagctggacactgtcatgggggctattt

SEQ ID NO: 1062019 - DNA, 33 bp, Homo sapien
tcaactacctaagctcgaattcaagatggaaaa

SEQ ID NO: 1062020 - DNA, 33 bp, Homo sapien
tcaactacctaagctctaattcaagatggaaaa

SEQ ID NO: 1062021 - DNA, 33 bp, Homo sapien
atttctttagggaatcaaaaatgaatactcata

SEQ ID NO: 1062022 - DNA, 33 bp, Homo sapien
atttctttagggaatcgaaaatgaatactcata

SEQ ID NO: 1062023 - DNA, 33 bp, Homo sapien
cttgttaggacagaaacagtggttgttgtgaaa

SEQ ID NO: 1062024 - DNA, 33 bp, Homo sapien
cttgttaggacagaaatagtggttgttgtgaaa

SEQ ID NO: 1062025 - DNA, 33 bp, Homo sapien
tttctcttctggtaggcagttatcaaatacact

SEQ ID NO: 1062026 - DNA, 33 bp, Homo sapien
tttctcttctggtaggtagttatcaaatacact

SEQ ID NO: 1062027 - DNA, 33 bp, Homo sapien
tatgtgtttgtttttacgctgggaccatactgt

SEQ ID NO: 1062028 - DNA, 33 bp, Homo sapien
tatgtgtttgtttttatgctgggaccatactgt

SEQ ID NO: 1062029 - DNA, 33 bp, Homo sapien
aaattaaaatggctaacaatatctagtgctgtt

SEQ ID NO: 1062030 - DNA, 33 bp, Homo sapien
aaattaaaatggctaagaatatctagtgctgtt

SEQ ID NO: 1062031 - DNA, 33 bp, Homo sapien
cattgatggacaaatacgttaaatgcatgtatt

SEQ ID NO: 1062032 - DNA, 33 bp, Homo sapien
cattgatggacaaataggttaaatgcatgtatt

SEQ ID NO: 1062033 - DNA, 33 bp, Homo sapien
tccaggcacatggaacacttgtttgcctgtttc

SEQ ID NO: 1062034 - DNA, 33 bp, Homo sapien
tccaggcacatggaacgcttgtttgcctgtttc

SEQ ID NO: 1062035 - DNA, 33 bp, Homo sapien
tcacttttccattagagatccaagcaaaccagg

SEQ ID NO: 1062036 - DNA, 33 bp, Homo sapien
tcacttttccattagatatccaagcaaaccagg

SEQ ID NO: 1062037 - DNA, 33 bp, Homo sapien
aaagccagcacactaacagaaaactggagtaga

SEQ ID NO: 1062038 - DNA, 33 bp, Homo sapien
aaagccagcacactaagagaaaactggagtaga

SEQ ID NO: 1062039 - DNA, 33 bp, Homo sapien
aataggtacaatgtcaaaacctaatatcttaga

SEQ ID NO: 1062040 - DNA, 33 bp, Homo sapien
aataggtacaatgtcacaacctaatatcttaga

SEQ ID NO: 1062041 - DNA, 33 bp, Homo sapien
tgctattgagttgtagcagctccatatatatgt

SEQ ID NO: 1062042 - DNA, 33 bp, Homo sapien
tgctattgagttgtagtagctccatatatatgt

SEQ ID NO: 1062043 - DNA, 33 bp, Homo sapien
gtatggtatgtgataagggttgacttttatcct

SEQ ID NO: 1062044 - DNA, 33 bp, Homo sapien
gtatggtatgtgataatggttgacttttatcct

SEQ ID NO: 1062045 - DNA, 33 bp, Homo sapien
aatgttctacagagccaatctttttaaagtata

SEQ ID NO: 1062046 - DNA, 33 bp, Homo sapien
aatgttctacagagccgatctttttaaagtata

SEQ ID NO: 1062047 - DNA, 33 bp, Homo sapien
gggagaagggagtatcaaatatatccagacagc

SEQ ID NO: 1062048 - DNA, 33 bp, Homo sapien
gggagaagggagtatctaatatatccagacagc

SEQ ID NO: 1062049 - DNA, 33 bp, Homo sapien
ctaaatgcccttgaagaaaacctagaaaatact

SEQ ID NO: 1062050 - DNA, 33 bp, Homo sapien
ctaaatgcccttgaagtaaacctagaaaatact

SEQ ID NO: 1062051 - DNA, 33 bp, Homo sapien
taatgttgtataaccacgtaatccagtatggcc

SEQ ID NO: 1062052 - DNA, 33 bp, Homo sapien
taatgttgtataaccatgtaatccagtatggcc

SEQ ID NO: 1062053 - DNA, 33 bp, Homo sapien
taagtaagctcgagaccgaaatggttttcaagg

SEQ ID NO: 1062054 - DNA, 33 bp, Homo sapien
taagtaagctcgagactgaaatggttttcaagg

SEQ ID NO: 1062055 - DNA, 33 bp, Homo sapien
accaagaagagatgtacagattcctggcgcata

SEQ ID NO: 1062056 - DNA, 33 bp, Homo sapien
accaagaagagatgtatagattcctggcgcata

SEQ ID NO: 1062057 - DNA, 33 bp, Homo sapien
tttatttggctcataactctgctggctggaaga

SEQ ID NO: 1062058 - DNA, 33 bp, Homo sapien
tttatttggctcataattctgctggctggaaga

SEQ ID NO: 1062059 - DNA, 33 bp, Homo sapien
tatttcataacgaacaaactgaaaacaatcaca

SEQ ID NO: 1062060 - DNA, 33 bp, Homo sapien
tatttcataacgaacacactgaaaacaatcaca

SEQ ID NO: 1062061 - DNA, 33 bp, Homo sapien
gtactcaggtgggaccaacctcacaagatggcc

SEQ ID NO: 1062062 - DNA, 33 bp, Homo sapien
gtactcaggtgggaccgacctcacaagatggcc

SEQ ID NO: 1062063 - DNA, 33 bp, Homo sapien
gccttagttcacactacgatactctgcttacaa

SEQ ID NO: 1062064 - DNA, 33 bp, Homo sapien
gccttagttcacactatgatactctgcttacaa

SEQ ID NO: 1062065 - DNA, 33 bp, Homo sapien
ctctcccattgaccaccgctatctattctgctc

SEQ ID NO: 1062066 - DNA, 33 bp, Homo sapien
ctctcccattgaccactgctatctattctgctc

SEQ ID NO: 1062067 - DNA, 33 bp, Homo sapien
gaaaacttaagacacagaaatgcacgaggagtt

SEQ ID NO: 1062068 - DNA, 33 bp, Homo sapien
gaaaacttaagacacataaatgcacgaggagtt

SEQ ID NO: 1062069 - DNA, 33 bp, Homo sapien
atagacggcctatcacagcatttctactctaaa

SEQ ID NO: 1062070 - DNA, 33 bp, Homo sapien
atagacggcctatcacggcatttctactctaaa

SEQ ID NO: 1062071 - DNA, 33 bp, Homo sapien
gaaaattacacgattccaactcatacattttgt

SEQ ID NO: 1062072 - DNA, 33 bp, Homo sapien
gaaaattacacgattctaactcatacattttgt

SEQ ID NO: 1062073 - DNA, 33 bp, Homo sapien
tgaaatgatttgctaaaagttacagctaacagc

SEQ ID NO: 1062074 - DNA, 33 bp, Homo sapien
tgaaatgatttgctaagagttacagctaacagc

SEQ ID NO: 1062075 - DNA, 33 bp, Homo sapien
tttttcagaaacagccaaaaatatatattgtat

SEQ ID NO: 1062076 - DNA, 33 bp, Homo sapien
tttttcagaaacagccgaaaatatatattgtat

SEQ ID NO: 1062077 - DNA, 33 bp, Homo sapien
aatagatttgtgatgacaaggaactcaaatatt

SEQ ID NO: 1062078 - DNA, 33 bp, Homo sapien
aatagatttgtgatgagaaggaactcaaatatt

SEQ ID NO: 1062079 - DNA, 33 bp, Homo sapien
attaaatccttacaagccatatttttttcagac

SEQ ID NO: 1062080 - DNA, 33 bp, Homo sapien
attaaatccttacaaggcatatttttttcagac

SEQ ID NO: 1062081 - DNA, 33 bp, Homo sapien
attgaccttctttcaacgtgtctagataaaagg

SEQ ID NO: 1062082 - DNA, 33 bp, Homo sapien
attgaccttctttcaatgtgtctagataaaagg

SEQ ID NO: 1062083 - DNA, 33 bp, Homo sapien
tcatctctaccctaccaatatatcaaatactat

SEQ ID NO: 1062084 - DNA, 33 bp, Homo sapien
tcatctctaccctaccgatatatcaaatactat

SEQ ID NO: 1062085 - DNA, 33 bp, Homo sapien
cctgcaccttcaggtacgtcccagcatctattt

SEQ ID NO: 1062086 - DNA, 33 bp, Homo sapien
cctgcaccttcaggtatgtcccagcatctattt

SEQ ID NO: 1062087 - DNA, 33 bp, Homo sapien
aaaatttttttgtcaacctaactcacataaatt

SEQ ID NO: 1062088 - DNA, 33 bp, Homo sapien
aaaatttttttgtcaatctaactcacataaatt

SEQ ID NO: 1062089 - DNA, 33 bp, Homo sapien
tctgccaagttactccccatgccattaaaaggc

SEQ ID NO: 1062090 - DNA, 33 bp, Homo sapien
tctgccaagttactcctcatgccattaaaaggc

SEQ ID NO: 1062091 - DNA, 33 bp, Homo sapien
agaatttcatctttgaccttctctattagtctg

SEQ ID NO: 1062092 - DNA, 33 bp, Homo sapien
agaatttcatctttgatcttctctattagtctg

SEQ ID NO: 1062093 - DNA, 33 bp, Homo sapien
aaatgcaatattgtacccttctaagatggaggg

SEQ ID NO: 1062094 - DNA, 33 bp, Homo sapien
aaatgcaatattgtacgcttctaagatggaggg

SEQ ID NO: 1062095 - DNA, 33 bp, Homo sapien
caacatagaaggttgtaaagcagcaaagatgat

SEQ ID NO: 1062096 - DNA, 33 bp, Homo sapien
caacatagaaggttgtgaagcagcaaagatgat

SEQ ID NO: 1062097 - DNA, 33 bp, Homo sapien
caaatccgtttatagaaaaccaaggcaggtaga

SEQ ID NO: 1062098 - DNA, 33 bp, Homo sapien
caaatccgtttatagacaaccaaggcaggtaga

SEQ ID NO: 1062099 - DNA, 33 bp, Homo sapien
gtatgagtgaaaggataaaatgaagtgaattga

SEQ ID NO: 1062100 - DNA, 33 bp, Homo sapien
gtatgagtgaaaggatgaaatgaagtgaattga

SEQ ID NO: 1062101 - DNA, 33 bp, Homo sapien
atgtgggaaggataacacatatttttcattttt

SEQ ID NO: 1062102 - DNA, 33 bp, Homo sapien
atgtgggaaggataacgcatatttttcattttt

SEQ ID NO: 1062103 - DNA, 33 bp, Homo sapien
tgaggagtgcagaagacggaaaaaggaaagtgg

SEQ ID NO: 1062104 - DNA, 33 bp, Homo sapien
tgaggagtgcagaagatggaaaaaggaaagtgg

SEQ ID NO: 1062105 - DNA, 33 bp, Homo sapien
ataaaaatggctgatacggtttagatatttgtc

SEQ ID NO: 1062106 - DNA, 33 bp, Homo sapien
ataaaaatggctgatagggtttagatatttgtc

SEQ ID NO: 1062107 - DNA, 33 bp, Homo sapien
atacaatggttagctacgtgtagtttacatttt

SEQ ID NO: 1062108 - DNA, 33 bp, Homo sapien
atacaatggttagctatgtgtagtttacatttt

SEQ ID NO: 1062109 - DNA, 33 bp, Homo sapien
catatcatttcattaacgtattggagaaattag

SEQ ID NO: 1062110 - DNA, 33 bp, Homo sapien
catatcatttcattaaggtattggagaaattag

SEQ ID NO: 1062111 - DNA, 33 bp, Homo sapien
ttgtttcccatgtcaaaatatttcttcttacat

SEQ ID NO: 1062112 - DNA, 33 bp, Homo sapien
ttgtttcccatgtcaagatatttcttcttacat

SEQ ID NO: 1062113 - DNA, 33 bp, Homo sapien
agatagagtttaaaatcatttcccattctatga

SEQ ID NO: 1062114 - DNA, 33 bp, Homo sapien
agatagagtttaaaatgatttcccattctatga

SEQ ID NO: 1062115 - DNA, 33 bp, Homo sapien
gtactcttgagccataaaagaatataagtgaat

SEQ ID NO: 1062116 - DNA, 33 bp, Homo sapien
gtactcttgagccatacaagaatataagtgaat

SEQ ID NO: 1062117 - DNA, 33 bp, Homo sapien
cagaccaacaagctttcacattgaatcagtaat

SEQ ID NO: 1062118 - DNA, 33 bp, Homo sapien
cagaccaacaagctttgacattgaatcagtaat

SEQ ID NO: 1062119 - DNA, 33 bp, Homo sapien
caccaaaaatcaacagaatgtcatcaccaaatg

SEQ ID NO: 1062120 - DNA, 33 bp, Homo sapien
caccaaaaatcaacaggatgtcatcaccaaatg

SEQ ID NO: 1062121 - DNA, 33 bp, Homo sapien
ttctaaggcctgaaaacgtaatagatggatttt

SEQ ID NO: 1062122 - DNA, 33 bp, Homo sapien
ttctaaggcctgaaaatgtaatagatggatttt

SEQ ID NO: 1062123 - DNA, 33 bp, Homo sapien
atatatttggtttcagaaattttagtgattggt

SEQ ID NO: 1062124 - DNA, 33 bp, Homo sapien
atatatttggtttcaggaattttagtgattggt

SEQ ID NO: 1062125 - DNA, 33 bp, Homo sapien
atatcctcagacagataagagatgctgcatctg

SEQ ID NO: 1062126 - DNA, 33 bp, Homo sapien
atatcctcagacagatgagagatgctgcatctg

SEQ ID NO: 1062127 - DNA, 33 bp, Homo sapien
ttcatttatagtcaaaaaatggtgtggcagcta

SEQ ID NO: 1062128 - DNA, 33 bp, Homo sapien
ttcatttatagtcaaacaatggtgtggcagcta

SEQ ID NO: 1062129 - DNA, 33 bp, Homo sapien
tgtaagtttctcgcaaatgacttctcctattag

SEQ ID NO: 1062130 - DNA, 33 bp, Homo sapien
tgtaagtttctcgcaagtgacttctcctattag

SEQ ID NO: 1062131 - DNA, 33 bp, Homo sapien
gattgtctcaatctcaaagcactgatagtaata

SEQ ID NO: 1062132 - DNA, 33 bp, Homo sapien
gattgtctcaatctcagagcactgatagtaata

SEQ ID NO: 1062133 - DNA, 33 bp, Homo sapien
acacatttgctttggaagggaaattgagcattt

SEQ ID NO: 1062134 - DNA, 33 bp, Homo sapien
acacatttgctttggacgggaaattgagcattt

SEQ ID NO: 1062135 - DNA, 33 bp, Homo sapien
aatttgcctttgggtacacgtgtgaagttctta

SEQ ID NO: 1062136 - DNA, 33 bp, Homo sapien
aatttgcctttgggtatacgtgtgaagttctta

SEQ ID NO: 1062137 - DNA, 33 bp, Homo sapien
ttaagatgtttcaataccagaaagacattaaaa

SEQ ID NO: 1062138 - DNA, 33 bp, Homo sapien
ttaagatgtttcaatatcagaaagacattaaaa

SEQ ID NO: 1062139 - DNA, 33 bp, Homo sapien
aaataaaataaaaagcagatgctagcaaggttg

SEQ ID NO: 1062140 - DNA, 33 bp, Homo sapien
aaataaaataaaaagccgatgctagcaaggttg

SEQ ID NO: 1062141 - DNA, 33 bp, Homo sapien
tagcacttgaggataaatacatttgtaaactaa

SEQ ID NO: 1062142 - DNA, 33 bp, Homo sapien
tagcacttgaggataattacatttgtaaactaa

SEQ ID NO: 1062143 - DNA, 33 bp, Homo sapien
ttttccagtgttttagccatagctcgtcatata

SEQ ID NO: 1062144 - DNA, 33 bp, Homo sapien
ttttccagtgttttagtcatagctcgtcatata

SEQ ID NO: 1062145 - DNA, 33 bp, Homo sapien
ataagcttgaggtacaataaattcatataacct

SEQ ID NO: 1062146 - DNA, 33 bp, Homo sapien
ataagcttgaggtacagtaaattcatataacct

SEQ ID NO: 1062147 - DNA, 33 bp, Homo sapien
tgcgaacacttcatagaaaatagattcacctgg

SEQ ID NO: 1062148 - DNA, 33 bp, Homo sapien
tgcgaacacttcataggaaatagattcacctgg

SEQ ID NO: 1062149 - DNA, 33 bp, Homo sapien
acttaaaaatgtaagacggcagatatcatgtga

SEQ ID NO: 1062150 - DNA, 33 bp, Homo sapien
acttaaaaatgtaagatggcagatatcatgtga

SEQ ID NO: 1062151 - DNA, 33 bp, Homo sapien
gaatatattctagcaacctgttgtaccacatag

SEQ ID NO: 1062152 - DNA, 33 bp, Homo sapien
gaatatattctagcaatctgttgtaccacatag

SEQ ID NO: 1062153 - DNA, 33 bp, Homo sapien
cgtaacaataacggtaaatgacccaaattactt

SEQ ID NO: 1062154 - DNA, 33 bp, Homo sapien
cgtaacaataacggtagatgacccaaattactt

SEQ ID NO: 1062155 - DNA, 33 bp, Homo sapien
taggcaaggagttcataaccaaaaagccaaaag

SEQ ID NO: 1062156 - DNA, 33 bp, Homo sapien
taggcaaggagttcatgaccaaaaagccaaaag

SEQ ID NO: 1062157 - DNA, 33 bp, Homo sapien
atgtcaagggtacatactatcagcatgatttat

SEQ ID NO: 1062158 - DNA, 33 bp, Homo sapien
atgtcaagggtacatattatcagcatgatttat

SEQ ID NO: 1062159 - DNA, 33 bp, Homo sapien
atggaaagtgttgtgcagatttagtatccctta

SEQ ID NO: 1062160 - DNA, 33 bp, Homo sapien
atggaaagtgttgtgcggatttagtatccctta

SEQ ID NO: 1062161 - DNA, 33 bp, Homo sapien
aataaaaaaattgatgccagtagtggggcgatg

SEQ ID NO: 1062162 - DNA, 33 bp, Homo sapien
aataaaaaaattgatgtcagtagtggggcgatg

SEQ ID NO: 1062163 - DNA, 33 bp, Homo sapien
atggaattagaaaaaactgttccagaattcata

SEQ ID NO: 1062164 - DNA, 33 bp, Homo sapien
atggaattagaaaaaattgttccagaattcata

SEQ ID NO: 1062165 - DNA, 33 bp, Homo sapien
aagaccttaaaacataactaccacttggcacag

SEQ ID NO: 1062166 - DNA, 33 bp, Homo sapien
aagaccttaaaacatatctaccacttggcacag

SEQ ID NO: 1062167 - DNA, 33 bp, Homo sapien
ggcaatacgtattgataacttgagcaatagcaa

SEQ ID NO: 1062168 - DNA, 33 bp, Homo sapien
ggcaatacgtattgatcacttgagcaatagcaa

SEQ ID NO: 1062169 - DNA, 33 bp, Homo sapien
atgctttcaatggttccataggtccctcctttt

SEQ ID NO: 1062170 - DNA, 33 bp, Homo sapien
atgctttcaatggttctataggtccctcctttt

SEQ ID NO: 1062171 - DNA, 33 bp, Homo sapien
cttcaggaattacttacagtttatcttctgagc

SEQ ID NO: 1062172 - DNA, 33 bp, Homo sapien
cttcaggaattacttatagtttatcttctgagc

SEQ ID NO: 1062173 - DNA, 33 bp, Homo sapien
aacagtgttggttcaactgtaagacaacagttt

SEQ ID NO: 1062174 - DNA, 33 bp, Homo sapien
aacagtgttggttcaattgtaagacaacagttt

SEQ ID NO: 1062175 - DNA, 33 bp, Homo sapien
tatagagctaattgaacgttaaataaggacttc

SEQ ID NO: 1062176 - DNA, 33 bp, Homo sapien
tatagagctaattgaatgttaaataaggacttc

SEQ ID NO: 1062177 - DNA, 33 bp, Homo sapien
agccaggctcttgatactagtaacttttcagaa

SEQ ID NO: 1062178 - DNA, 33 bp, Homo sapien
agccaggctcttgatattagtaacttttcagaa

SEQ ID NO: 1062179 - DNA, 33 bp, Homo sapien
atctgtaccttaatatgacattgcacaggaggt

SEQ ID NO: 1062180 - DNA, 33 bp, Homo sapien
atctgtaccttaatattacattgcacaggaggt

SEQ ID NO: 1062181 - DNA, 33 bp, Homo sapien
aaatatagtgatgaaacaattgcttaatgtggg

SEQ ID NO: 1062182 - DNA, 33 bp, Homo sapien
aaatatagtgatgaaataattgcttaatgtggg

SEQ ID NO: 1062183 - DNA, 33 bp, Homo sapien
ctcccagagaaaactgaagaaactaaatgtgac

SEQ ID NO: 1062184 - DNA, 33 bp, Homo sapien
ctcccagagaaaactggagaaactaaatgtgac

SEQ ID NO: 1062185 - DNA, 33 bp, Homo sapien
atggtaagaagatgtcgccttgtgcaaaagaaa

SEQ ID NO: 1062186 - DNA, 33 bp, Homo sapien
atggtaagaagatgtctccttgtgcaaaagaaa

SEQ ID NO: 1062187 - DNA, 33 bp, Homo sapien
tcagcctgcagagtccaagaaatggtaacagga

SEQ ID NO: 1062188 - DNA, 33 bp, Homo sapien
tcagcctgcagagtccgagaaatggtaacagga

SEQ ID NO: 1062189 - DNA, 33 bp, Homo sapien
accaacaatttttaaaattaactgcgtacagtg

SEQ ID NO: 1062190 - DNA, 33 bp, Homo sapien
accaacaatttttaaagttaactgcgtacagtg

SEQ ID NO: 1062191 - DNA, 33 bp, Homo sapien
ggaattttggtcagctaaagtctgaacttaaca

SEQ ID NO: 1062192 - DNA, 33 bp, Homo sapien
ggaattttggtcagctgaagtctgaacttaaca

SEQ ID NO: 1062193 - DNA, 33 bp, Homo sapien
aaacaatctttgagaaaccaaaaatctaaaata

SEQ ID NO: 1062194 - DNA, 33 bp, Homo sapien
aaacaatctttgagaagccaaaaatctaaaata

SEQ ID NO: 1062195 - DNA, 33 bp, Homo sapien
acactgttctggatcccatataaatgagtaata

SEQ ID NO: 1062196 - DNA, 33 bp, Homo sapien
acactgttctggatcctatataaatgagtaata

SEQ ID NO: 1062197 - DNA, 33 bp, Homo sapien
ctgtgttactgtcatacaaaggattatagtgct

SEQ ID NO: 1062198 - DNA, 33 bp, Homo sapien
ctgtgttactgtcatataaaggattatagtgct

SEQ ID NO: 1062199 - DNA, 33 bp, Homo sapien
taatttaaaatgtatgaaattgcaacaagataa

SEQ ID NO: 1062200 - DNA, 33 bp, Homo sapien
taatttaaaatgtatggaattgcaacaagataa

SEQ ID NO: 1062201 - DNA, 33 bp, Homo sapien
agttagttttatcttgaactttctgattggata

SEQ ID NO: 1062202 - DNA, 33 bp, Homo sapien
agttagttttatcttggactttctgattggata

SEQ ID NO: 1062203 - DNA, 33 bp, Homo sapien
tcactatgggggaggtaaaatttgacttgggtc

SEQ ID NO: 1062204 - DNA, 33 bp, Homo sapien
tcactatgggggaggtgaaatttgacttgggtc

SEQ ID NO: 1062205 - DNA, 33 bp, Homo sapien
gggcacagggtagatgcaactaaatgactgaga

SEQ ID NO: 1062206 - DNA, 33 bp, Homo sapien
gggcacagggtagatgtaactaaatgactgaga

SEQ ID NO: 1062207 - DNA, 33 bp, Homo sapien
catactgggtcttagaatcaactccattttaga

SEQ ID NO: 1062208 - DNA, 33 bp, Homo sapien
catactgggtcttagagtcaactccattttaga

SEQ ID NO: 1062209 - DNA, 33 bp, Homo sapien
cattcataaactatggaaagcacaatgtgattt

SEQ ID NO: 1062210 - DNA, 33 bp, Homo sapien
cattcataaactatgggaagcacaatgtgattt

SEQ ID NO: 1062211 - DNA, 33 bp, Homo sapien
aacctaccaagatcgaaccaggaagaaatccaa

SEQ ID NO: 1062212 - DNA, 33 bp, Homo sapien
aacctaccaagatcgagccaggaagaaatccaa

SEQ ID NO: 1062213 - DNA, 33 bp, Homo sapien
cactacacatgattaccatgcctagattattca

SEQ ID NO: 1062214 - DNA, 33 bp, Homo sapien
cactacacatgattactatgcctagattattca

SEQ ID NO: 1062215 - DNA, 33 bp, Homo sapien
tcaatatatctgcctaagacatttgaaacacct

SEQ ID NO: 1062216 - DNA, 33 bp, Homo sapien
tcaatatatctgcctaggacatttgaaacacct

SEQ ID NO: 1062217 - DNA, 33 bp, Homo sapien
aaggagttgtctcactaacttgatgagaaggaa

SEQ ID NO: 1062218 - DNA, 33 bp, Homo sapien
aaggagttgtctcactgacttgatgagaaggaa

SEQ ID NO: 1062219 - DNA, 33 bp, Homo sapien
cctatctaagaataaagtggacggagacagctg

SEQ ID NO: 1062220 - DNA, 33 bp, Homo sapien
cctatctaagaataaattggacggagacagctg

SEQ ID NO: 1062221 - DNA, 33 bp, Homo sapien
cagtgtcctcttggaacatattttgtaaagaat

SEQ ID NO: 1062222 - DNA, 33 bp, Homo sapien
cagtgtcctcttggaatatattttgtaaagaat

SEQ ID NO: 1062223 - DNA, 33 bp, Homo sapien
aaaattggagttttcaaattaaagtctttctct

SEQ ID NO: 1062224 - DNA, 33 bp, Homo sapien
aaaattggagttttcagattaaagtctttctct

SEQ ID NO: 1062225 - DNA, 33 bp, Homo sapien
gtgaaggttatcacaacttctctcatgaagtgg

SEQ ID NO: 1062226 - DNA, 33 bp, Homo sapien
gtgaaggttatcacaagttctctcatgaagtgg

SEQ ID NO: 1062227 - DNA, 33 bp, Homo sapien
gacccagttggtccaaagttgaattaaggtctt

SEQ ID NO: 1062228 - DNA, 33 bp, Homo sapien
gacccagttggtccaatgttgaattaaggtctt

SEQ ID NO: 1062229 - DNA, 33 bp, Homo sapien
acatcatttatcacaacgacagtgtgtaggcat

SEQ ID NO: 1062230 - DNA, 33 bp, Homo sapien
acatcatttatcacaatgacagtgtgtaggcat

SEQ ID NO: 1062231 - DNA, 33 bp, Homo sapien
cctcctctcaacatgacgtaacatttcctgaag

SEQ ID NO: 1062232 - DNA, 33 bp, Homo sapien
cctcctctcaacatgatgtaacatttcctgaag

SEQ ID NO: 1062233 - DNA, 33 bp, Homo sapien
gagaaatggataaaaaacagaccataaaaggga

SEQ ID NO: 1062234 - DNA, 33 bp, Homo sapien
gagaaatggataaaaagcagaccataaaaggga

SEQ ID NO: 1062235 - DNA, 33 bp, Homo sapien
atttggcttcataagacctagaattatttcatt

SEQ ID NO: 1062236 - DNA, 33 bp, Homo sapien
atttggcttcataagagctagaattatttcatt

SEQ ID NO: 1062237 - DNA, 33 bp, Homo sapien
gcaatcaaaaacctgaacttgagaccaatgttt

SEQ ID NO: 1062238 - DNA, 33 bp, Homo sapien
gcaatcaaaaacctgagcttgagaccaatgttt

SEQ ID NO: 1062239 - DNA, 33 bp, Homo sapien
gctggagttcagagcaacttgaaaccattagaa

SEQ ID NO: 1062240 - DNA, 33 bp, Homo sapien
gctggagttcagagcagcttgaaaccattagaa

SEQ ID NO: 1062241 - DNA, 33 bp, Homo sapien
ggagagtttctgttgacattttgcatctaacta

SEQ ID NO: 1062242 - DNA, 33 bp, Homo sapien
ggagagtttctgttgatattttgcatctaacta

SEQ ID NO: 1062243 - DNA, 33 bp, Homo sapien
gattgagaaatgataaacagattggatttaagt

SEQ ID NO: 1062244 - DNA, 33 bp, Homo sapien
gattgagaaatgataagcagattggatttaagt

SEQ ID NO: 1062245 - DNA, 33 bp, Homo sapien
ttgtatttggcaaatacggttaagaagtgttta

SEQ ID NO: 1062246 - DNA, 33 bp, Homo sapien
ttgtatttggcaaatatggttaagaagtgttta

SEQ ID NO: 1062247 - DNA, 33 bp, Homo sapien
gagctagactataatacccataaaatcaaaatg

SEQ ID NO: 1062248 - DNA, 33 bp, Homo sapien
gagctagactataatatccataaaatcaaaatg

SEQ ID NO: 1062249 - DNA, 33 bp, Homo sapien
acattaactcctgagaacatatgtgagcttcaa

SEQ ID NO: 1062250 - DNA, 33 bp, Homo sapien
acattaactcctgagagcatatgtgagcttcaa

SEQ ID NO: 1062251 - DNA, 33 bp, Homo sapien
ggtggaggctggtcaacttatagggtctatcat

SEQ ID NO: 1062252 - DNA, 33 bp, Homo sapien
ggtggaggctggtcaatttatagggtctatcat

SEQ ID NO: 1062253 - DNA, 33 bp, Homo sapien
caccaattaaatgtcaccacagtaagcattagt

SEQ ID NO: 1062254 - DNA, 33 bp, Homo sapien
caccaattaaatgtcatcacagtaagcattagt

SEQ ID NO: 1062255 - DNA, 33 bp, Homo sapien
tctagtatttggtttaagtctgaaattttgaaa

SEQ ID NO: 1062256 - DNA, 33 bp, Homo sapien
tctagtatttggtttaggtctgaaattttgaaa

SEQ ID NO: 1062257 - DNA, 33 bp, Homo sapien
taaggtccatgtggtacataataccggttacag

SEQ ID NO: 1062258 - DNA, 33 bp, Homo sapien
taaggtccatgtggtatataataccggttacag

SEQ ID NO: 1062259 - DNA, 33 bp, Homo sapien
agttgtaggtgtcatactactcaacttcagact

SEQ ID NO: 1062260 - DNA, 33 bp, Homo sapien
agttgtaggtgtcatattactcaacttcagact

SEQ ID NO: 1062261 - DNA, 33 bp, Homo sapien
tataaatagatacaataaaacctaggctaaggc

SEQ ID NO: 1062262 - DNA, 33 bp, Homo sapien
tataaatagatacaatgaaacctaggctaaggc

SEQ ID NO: 1062263 - DNA, 33 bp, Homo sapien
gcagctaatgaaaattcaaatgtgttttgtact

SEQ ID NO: 1062264 - DNA, 33 bp, Homo sapien
gcagctaatgaaaattgaaatgtgttttgtact

SEQ ID NO: 1062265 - DNA, 33 bp, Homo sapien
aaggaatttccagcccggacttgccacaggact

SEQ ID NO: 1062266 - DNA, 33 bp, Homo sapien
aaggaatttccagccctgacttgccacaggact

SEQ ID NO: 1062267 - DNA, 33 bp, Homo sapien
aaggatataagctcaacttcatctgcctggata

SEQ ID NO: 1062268 - DNA, 33 bp, Homo sapien
aaggatataagctcaatttcatctgcctggata

SEQ ID NO: 1062269 - DNA, 33 bp, Homo sapien
agattatgaattttgggattagtaaagaaagca

SEQ ID NO: 1062270 - DNA, 33 bp, Homo sapien
agattatgaattttggtattagtaaagaaagca

SEQ ID NO: 1062271 - DNA, 33 bp, Homo sapien
gtgacacaaatttaccaacatactaaacctgta

SEQ ID NO: 1062272 - DNA, 33 bp, Homo sapien
gtgacacaaatttaccgacatactaaacctgta

SEQ ID NO: 1062273 - DNA, 33 bp, Homo sapien
atgaattaaattgtcaagtctctctagctgcat

SEQ ID NO: 1062274 - DNA, 33 bp, Homo sapien
atgaattaaattgtcaggtctctctagctgcat

SEQ ID NO: 1062275 - DNA, 33 bp, Homo sapien
gtcaggaagacagcaccaagccataagggttcc

SEQ ID NO: 1062276 - DNA, 33 bp, Homo sapien
gtcaggaagacagcacgaagccataagggttcc

SEQ ID NO: 1062277 - DNA, 33 bp, Homo sapien
agctcatctagttggaagctagtcaagactctc

SEQ ID NO: 1062278 - DNA, 33 bp, Homo sapien
agctcatctagttggaggctagtcaagactctc

SEQ ID NO: 1062279 - DNA, 33 bp, Homo sapien
gaaattggtcagttatcaagcatacaaaaataa

SEQ ID NO: 1062280 - DNA, 33 bp, Homo sapien
gaaattggtcagttattaagcatacaaaaataa

SEQ ID NO: 1062281 - DNA, 33 bp, Homo sapien
aagaactgtgtgacaaagagaagaaaaagatga

SEQ ID NO: 1062282 - DNA, 33 bp, Homo sapien
aagaactgtgtgacaaggagaagaaaaagatga

SEQ ID NO: 1062283 - DNA, 33 bp, Homo sapien
aaaaaccgttcatgacacacactgttaagagaa

SEQ ID NO: 1062284 - DNA, 33 bp, Homo sapien
aaaaaccgttcatgacgcacactgttaagagaa

SEQ ID NO: 1062285 - DNA, 33 bp, Homo sapien
gtaatagataggcatgaaagtgaaagaactgaa

SEQ ID NO: 1062286 - DNA, 33 bp, Homo sapien
gtaatagataggcatggaagtgaaagaactgaa

SEQ ID NO: 1062287 - DNA, 33 bp, Homo sapien
gagtcacctttattcaagttcccaacaagtttt

SEQ ID NO: 1062288 - DNA, 33 bp, Homo sapien
gagtcacctttattcacgttcccaacaagtttt

SEQ ID NO: 1062289 - DNA, 33 bp, Homo sapien; identical to SEQ ID NO: 1062287

SEQ ID NO: 1062290 - DNA, 33 bp, Homo sapien; identical to SEQ ID NO: 1062288

SEQ ID NO: 1062291 - DNA, 33 bp, Homo sapien
atctggttatttaaaaatgtgttgcacctacct

SEQ ID NO: 1062292 - DNA, 33 bp, Homo sapien
atctggttatttaaaagtgtgttgcacctacct

SEQ ID NO: 1062293 - DNA, 33 bp, Homo sapien
aaaagtaatagcatgagagttaaaatttattat

SEQ ID NO: 1062294 - DNA, 33 bp, Homo sapien
aaaagtaatagcatgatagttaaaatttattat

SEQ ID NO: 1062295 - DNA, 33 bp, Homo sapien
aattcagaatatgagacaggaacttgccaaaaa

SEQ ID NO: 1062296 - DNA, 33 bp, Homo sapien
aattcagaatatgagagaggaacttgccaaaaa

SEQ ID NO: 1062297 - DNA, 33 bp, Homo sapien
gctcagtgagatacaacggaatactggaaaaaa

SEQ ID NO: 1062298 - DNA, 33 bp, Homo sapien
gctcagtgagatacaagggaatactggaaaaaa

SEQ ID NO: 1062299 - DNA, 33 bp, Homo sapien
ctaccttgttggttaacgtattcctagatatct

SEQ ID NO: 1062300 - DNA, 33 bp, Homo sapien
ctaccttgttggttaatgtattcctagatatct

SEQ ID NO: 1062301 - DNA, 33 bp, Homo sapien
tggaggtaccacattaccatttttcaaactgta

SEQ ID NO: 1062302 - DNA, 33 bp, Homo sapien
tggaggtaccacattatcatttttcaaactgta

SEQ ID NO: 1062303 - DNA, 33 bp, Homo sapien
attcatttcccattagacatttttccagtgtga

SEQ ID NO: 1062304 - DNA, 33 bp, Homo sapien
attcatttcccattaggcatttttccagtgtga

SEQ ID NO: 1062305 - DNA, 33 bp, Homo sapien
taaggaagttaaaatcgctaagtgaagtgagta

SEQ ID NO: 1062306 - DNA, 33 bp, Homo sapien
taaggaagttaaaatctctaagtgaagtgagta

SEQ ID NO: 1062307 - DNA, 33 bp, Homo sapien
atcactgttcaggagaaacaaatagccttggaa

SEQ ID NO: 1062308 - DNA, 33 bp, Homo sapien
atcactgttcaggagatacaaatagccttggaa

SEQ ID NO: 1062309 - DNA, 33 bp, Homo sapien
cttttacctgaacagcacaatcataaaacattt

SEQ ID NO: 1062310 - DNA, 33 bp, Homo sapien
cttttacctgaacagcgcaatcataaaacattt

SEQ ID NO: 1062311 - DNA, 33 bp, Homo sapien
gggataagaaccagcaaaagcttcatcgaatga

SEQ ID NO: 1062312 - DNA, 33 bp, Homo sapien
gggataagaaccagcagaagcttcatcgaatga

SEQ ID NO: 1062313 - DNA, 33 bp, Homo sapien
aaacatatgatattcaggcttgcactatttaaa

SEQ ID NO: 1062314 - DNA, 33 bp, Homo sapien
aaacatatgatattcatgcttgcactatttaaa

SEQ ID NO: 1062315 - DNA, 33 bp, Homo sapien
acaactaaagaactgaacttcagaattgttatt

SEQ ID NO: 1062316 - DNA, 33 bp, Homo sapien
acaactaaagaactgagcttcagaattgttatt

SEQ ID NO: 1062317 - DNA, 33 bp, Homo sapien
aacagtgagacaattacgaaaggtgtaacatat

SEQ ID NO: 1062318 - DNA, 33 bp, Homo sapien
aacagtgagacaattatgaaaggtgtaacatat

SEQ ID NO: 1062319 - DNA, 33 bp, Homo sapien
acaccttcacgcttccaattaacttaggtattc

SEQ ID NO: 1062320 - DNA, 33 bp, Homo sapien
acaccttcacgcttcccattaacttaggtattc

SEQ ID NO: 1062321 - DNA, 33 bp, Homo sapien
aagtgagtacatgaggcatttggtgttcttttc

SEQ ID NO: 1062322 - DNA, 33 bp, Homo sapien
aagtgagtacatgaggtatttggtgttcttttc

SEQ ID NO: 1062323 - DNA, 33 bp, Homo sapien
aaatgagtctctcctaagttttccggaatattt

SEQ ID NO: 1062324 - DNA, 33 bp, Homo sapien
aaatgagtctctcctacgttttccggaatattt

SEQ ID NO: 1062325 - DNA, 33 bp, Homo sapien
tattctagcccattgacaatttcctcagctggg

SEQ ID NO: 1062326 - DNA, 33 bp, Homo sapien
tattctagcccattgataatttcctcagctggg

SEQ ID NO: 1062327 - DNA, 33 bp, Homo sapien
gtgaagagcacctgtactaaaagcatgaagtat

SEQ ID NO: 1062328 - DNA, 33 bp, Homo sapien
gtgaagagcacctgtagtaaaagcatgaagtat

SEQ ID NO: 1062329 - DNA, 33 bp, Homo sapien
aaatacctaggaatacagctaatcagggaagcc

SEQ ID NO: 1062330 - DNA, 33 bp, Homo sapien
aaatacctaggaatacggctaatcagggaagcc

SEQ ID NO: 1062331 - DNA, 33 bp, Homo sapien
tacaaacaactctcagaaattatcacaaatact

SEQ ID NO: 1062332 - DNA, 33 bp, Homo sapien
tacaaacaactctcaggaattatcacaaatact

SEQ ID NO: 1062333 - DNA, 33 bp, Homo sapien
actggatttagcacttcaaatggttttaggaat

SEQ ID NO: 1062334 - DNA, 33 bp, Homo sapien
actggatttagcactttaaatggttttaggaat

SEQ ID NO: 1062335 - DNA, 33 bp, Homo sapien
acaacatggttcagtacgtaaaaatctttaaaa

SEQ ID NO: 1062336 - DNA, 33 bp, Homo sapien
acaacatggttcagtatgtaaaaatctttaaaa

SEQ ID NO: 1062337 - DNA, 33 bp, Homo sapien
aaatgactatatgatcccttttatcttgttatt

SEQ ID NO: 1062338 - DNA, 33 bp, Homo sapien
aaatgactatatgatctcttttatcttgttatt

SEQ ID NO: 1062339 - DNA, 33 bp, Homo sapien
cattggactttggtcactactggacttgaacag

SEQ ID NO: 1062340 - DNA, 33 bp, Homo sapien
cattggactttggtcattactggacttgaacag

SEQ ID NO: 1062341 - DNA, 33 bp, Homo sapien
ggggtcttaagtcagccatgatgaattctagca

SEQ ID NO: 1062342 - DNA, 33 bp, Homo sapien
ggggtcttaagtcagctatgatgaattctagca

SEQ ID NO: 1062343 - DNA, 33 bp, Homo sapien
agaagacttcctcaaaacatttaatattcaaac

SEQ ID NO: 1062344 - DNA, 33 bp, Homo sapien
agaagacttcctcaaagcatttaatattcaaac

SEQ ID NO: 1062345 - DNA, 33 bp, Homo sapien
gcttctttatgctttaactagaggaggcaggtc

SEQ ID NO: 1062346 - DNA, 33 bp, Homo sapien
gcttctttatgctttatctagaggaggcaggtc

SEQ ID NO: 1062347 - DNA, 33 bp, Homo sapien
tgtaaatgcagaaataagtttaggataataaag

SEQ ID NO: 1062348 - DNA, 33 bp, Homo sapien
tgtaaatgcagaaataggtttaggataataaag

SEQ ID NO: 1062349 - DNA, 33 bp, Homo sapien
ggccagcaggacaaaaggataagacccaaacat

SEQ ID NO: 1062350 - DNA, 33 bp, Homo sapien
ggccagcaggacaaaatgataagacccaaacat

SEQ ID NO: 1062351 - DNA, 33 bp, Homo sapien
ttacatgagaatattgcatggtgcttagatagg

SEQ ID NO: 1062352 - DNA, 33 bp, Homo sapien
ttacatgagaatattgtatggtgcttagatagg

SEQ ID NO: 1062353 - DNA, 33 bp, Homo sapien
agtaatttataagttacgtgtcaatacatgttt

SEQ ID NO: 1062354 - DNA, 33 bp, Homo sapien
agtaatttataagttatgtgtcaatacatgttt

SEQ ID NO: 1062355 - DNA, 33 bp, Homo sapien
tctgagagttattttacacagctgtttgtgcag

SEQ ID NO: 1062356 - DNA, 33 bp, Homo sapien
tctgagagttattttatacagctgtttgtgcag

SEQ ID NO: 1062357 - DNA, 33 bp, Homo sapien
catactatggacattacctaaatggctatttat

SEQ ID NO: 1062358 - DNA, 33 bp, Homo sapien
catactatggacattatctaaatggctatttat

SEQ ID NO: 1062359 - DNA, 33 bp, Homo sapien
tagaagtgatttcaaccaatttttcatgtggga

SEQ ID NO: 1062360 - DNA, 33 bp, Homo sapien
tagaagtgatttcaactaatttttcatgtggga

SEQ ID NO: 1062361 - DNA, 33 bp, Homo sapien
agaaatttatagattcaatgctactcctagcaa

SEQ ID NO: 1062362 - DNA, 33 bp, Homo sapien
agaaatttatagattcgatgctactcctagcaa

SEQ ID NO: 1062363 - DNA, 33 bp, Homo sapien
ttgttacatttgtaaactgtgtattgctgatgc

SEQ ID NO: 1062364 - DNA, 33 bp, Homo sapien
ttgttacatttgtaaattgtgtattgctgatgc

SEQ ID NO: 1062365 - DNA, 33 bp, Homo sapien
cttcgtttctgtttataaagacatatgaaaatg

SEQ ID NO: 1062366 - DNA, 33 bp, Homo sapien
cttcgtttctgtttatgaagacatatgaaaatg

SEQ ID NO: 1062367 - DNA, 33 bp, Homo sapien
catgggattgtttgtaaaacacagaaaagataa

SEQ ID NO: 1062368 - DNA, 33 bp, Homo sapien
catgggattgtttgtataacacagaaaagataa

SEQ ID NO: 1062369 - DNA, 33 bp, Homo sapien
aaaagcaaaaatatccaggaatcagcatactaa

SEQ ID NO: 1062370 - DNA, 33 bp, Homo sapien
aaaagcaaaaatatcccggaatcagcatactaa

SEQ ID NO: 1062371 - DNA, 33 bp, Homo sapien
caaaatccagtaggtccctgttctccagtctac

SEQ ID NO: 1062372 - DNA, 33 bp, Homo sapien
caaaatccagtaggtctctgttctccagtctac

SEQ ID NO: 1062373 - DNA, 33 bp, Homo sapien
gatttatggagtgaaagaatgatctttttaaga

SEQ ID NO: 1062374 - DNA, 33 bp, Homo sapien
gatttatggagtgaaataatgatctttttaaga

SEQ ID NO: 1062375 - DNA, 33 bp, Homo sapien
gggaattctgtattccaactctctactccagta

SEQ ID NO: 1062376 - DNA, 33 bp, Homo sapien
gggaattctgtattccgactctctactccagta

SEQ ID NO: 1062377 - DNA, 33 bp, Homo sapien
attatatattgattcacggaatttggtaagtgg

SEQ ID NO: 1062378 - DNA, 33 bp, Homo sapien
attatatattgattcatggaatttggtaagtgg

SEQ ID NO: 1062379 - DNA, 33 bp, Homo sapien
atttcaaattctctgacggcaagattacattta

SEQ ID NO: 1062380 - DNA, 33 bp, Homo sapien
atttcaaattctctgatggcaagattacattta

SEQ ID NO: 1062381 - DNA, 33 bp, Homo sapien
gtatacgggaacaatacactttctgctcagttt

SEQ ID NO: 1062382 - DNA, 33 bp, Homo sapien
gtatacgggaacaatatactttctgctcagttt

SEQ ID NO: 1062383 - DNA, 33 bp, Homo sapien
cacccaaagttcaacacagtgtacattaaggat

SEQ ID NO: 1062384 - DNA, 33 bp, Homo sapien
cacccaaagttcaacatagtgtacattaaggat

SEQ ID NO: 1062385 - DNA, 33 bp, Homo sapien
caaagctaatagtcaacagtgagtaaatgcaat

SEQ ID NO: 1062386 - DNA, 33 bp, Homo sapien
caaagctaatagtcaagagtgagtaaatgcaat

SEQ ID NO: 1062387 - DNA, 33 bp, Homo sapien
ttcacttatcatgaagcctcaaaaagccgaaaa

SEQ ID NO: 1062388 - DNA, 33 bp, Homo sapien
ttcacttatcatgaagtctcaaaaagccgaaaa

SEQ ID NO: 1062389 - DNA, 33 bp, Homo sapien
caaaatcacatgtggcacctgcaataggaggaa

SEQ ID NO: 1062390 - DNA, 33 bp, Homo sapien
caaaatcacatgtggcgcctgcaataggaggaa

SEQ ID NO: 1062391 - DNA, 33 bp, Homo sapien
agccaatacttgaatccctggaagttgggttgg

SEQ ID NO: 1062392 - DNA, 33 bp, Homo sapien
agccaatacttgaatctctggaagttgggttgg

SEQ ID NO: 1062393 - DNA, 33 bp, Homo sapien
cctctgactctgcctacataagtgaatacttaa

SEQ ID NO: 1062394 - DNA, 33 bp, Homo sapien
cctctgactctgcctatataagtgaatacttaa

SEQ ID NO: 1062395 - DNA, 33 bp, Homo sapien
gaactaatttacattcccatcatcagtgcattt

SEQ ID NO: 1062396 - DNA, 33 bp, Homo sapien
gaactaatttacattcgcatcatcagtgcattt

SEQ ID NO: 1062397 - DNA, 33 bp, Homo sapien
gaaatagtaataaatagcatctgagcaatgcaa

SEQ ID NO: 1062398 - DNA, 33 bp, Homo sapien
gaaatagtaataaatatcatctgagcaatgcaa

SEQ ID NO: 1062399 - DNA, 33 bp, Homo sapien
aaggtcaaccctacaaaccataataaaatacac

SEQ ID NO: 1062400 - DNA, 33 bp, Homo sapien
aaggtcaaccctacaagccataataaaatacac

SEQ ID NO: 1062401 - DNA, 33 bp, Homo sapien
ttcgaattataggaaaagtctgaattctgctta

SEQ ID NO: 1062402 - DNA, 33 bp, Homo sapien
ttcgaattataggaaaggtctgaattctgctta

SEQ ID NO: 1062403 - DNA, 33 bp, Homo sapien
caatacaaggtcatgacgattttaattctctgc

SEQ ID NO: 1062404 - DNA, 33 bp, Homo sapien
caatacaaggtcatgatgattttaattctctgc

SEQ ID NO: 1062405 - DNA, 33 bp, Homo sapien
gtctacagtaatatacaataatttcctaggctt

SEQ ID NO: 1062406 - DNA, 33 bp, Homo sapien
gtctacagtaatatacgataatttcctaggctt

SEQ ID NO: 1062407 - DNA, 33 bp, Homo sapien
acagcccaaatttcaaaaacaaatatgctttac

SEQ ID NO: 1062408 - DNA, 33 bp, Homo sapien
acagcccaaatttcaagaacaaatatgctttac

SEQ ID NO: 1062409 - DNA, 33 bp, Homo sapien
tttgcggacaaaagaaacttagactgttagata

SEQ ID NO: 1062410 - DNA, 33 bp, Homo sapien
tttgcggacaaaagaagcttagactgttagata

SEQ ID NO: 1062411 - DNA, 33 bp, Homo sapien
ggtccatgtatagttcaaagtatctgtagaata

SEQ ID NO: 1062412 - DNA, 33 bp, Homo sapien
ggtccatgtatagttcgaagtatctgtagaata

SEQ ID NO: 1062413 - DNA, 33 bp, Homo sapien
aaaaatccctactgtcacaattctggtatacat

SEQ ID NO: 1062414 - DNA, 33 bp, Homo sapien
aaaaatccctactgtcgcaattctggtatacat

SEQ ID NO: 1062415 - DNA, 33 bp, Homo sapien
tttgaatgccatgttaaggagtatagaccatat

SEQ ID NO: 1062416 - DNA, 33 bp, Homo sapien
tttgaatgccatgttatggagtatagaccatat

SEQ ID NO: 1062417 - DNA, 33 bp, Homo sapien
accagagaaactatgcacctactttcaagaaga

SEQ ID NO: 1062418 - DNA, 33 bp, Homo sapien
accagagaaactatgcgcctactttcaagaaga

SEQ ID NO: 1062419 - DNA, 33 bp, Homo sapien
ggaaggcagctataaaattatacaatagtacag

SEQ ID NO: 1062420 - DNA, 33 bp, Homo sapien
ggaaggcagctataaagttatacaatagtacag

SEQ ID NO: 1062421 - DNA, 33 bp, Homo sapien
tgtagtgcagtgccacaaatgtattttctctca

SEQ ID NO: 1062422 - DNA, 33 bp, Homo sapien
tgtagtgcagtgccacgaatgtattttctctca

SEQ ID NO: 1062423 - DNA, 33 bp, Homo sapien
atggggctaactcctacaacctttgcattgttc

SEQ ID NO: 1062424 - DNA, 33 bp, Homo sapien
atggggctaactcctataacctttgcattgttc

SEQ ID NO: 1062425 - DNA, 33 bp, Homo sapien
gttaccaagaatgacaagccctaaatgctcttt

SEQ ID NO: 1062426 - DNA, 33 bp, Homo sapien
gttaccaagaatgacaggccctaaatgctcttt

SEQ ID NO: 1062427 - DNA, 33 bp, Homo sapien
gattaaaatacatcatcacaaaattatgaacat

SEQ ID NO: 1062428 - DNA, 33 bp, Homo sapien
gattaaaatacatcatgacaaaattatgaacat

SEQ ID NO: 1062429 - DNA, 33 bp, Homo sapien
ttgtatcaagatgcccagaagaagaatgttttt

SEQ ID NO: 1062430 - DNA, 33 bp, Homo sapien
ttgtatcaagatgcccggaagaagaatgttttt

SEQ ID NO: 1062431 - DNA, 33 bp, Homo sapien
tactttctagcacttccctttatcaagcataaa

SEQ ID NO: 1062432 - DNA, 33 bp, Homo sapien
tactttctagcacttctctttatcaagcataaa

SEQ ID NO: 1062433 - DNA, 33 bp, Homo sapien
tacaagaaataacaaacggtgcatacaacatgc

SEQ ID NO: 1062434 - DNA, 33 bp, Homo sapien
tacaagaaataacaaatggtgcatacaacatgc

SEQ ID NO: 1062435 - DNA, 33 bp, Homo sapien
ctcacacttaataggacccacaatgtgccagaa

SEQ ID NO: 1062436 - DNA, 33 bp, Homo sapien
ctcacacttaataggatccacaatgtgccagaa

SEQ ID NO: 1062437 - DNA, 33 bp, Homo sapien
aaacggtacgcaagaaaagagacccaatttttc

SEQ ID NO: 1062438 - DNA, 33 bp, Homo sapien
aaacggtacgcaagaagagagacccaatttttc

SEQ ID NO: 1062439 - DNA, 33 bp, Homo sapien
gagcatatcttagttaccatgtggctccgtaag

SEQ ID NO: 1062440 - DNA, 33 bp, Homo sapien
gagcatatcttagttatcatgtggctccgtaag

SEQ ID NO: 1062441 - DNA, 33 bp, Homo sapien
aagtatccaggtttaaataataggagactcaat

SEQ ID NO: 1062442 - DNA, 33 bp, Homo sapien
aagtatccaggtttaattaataggagactcaat

SEQ ID NO: 1062443 - DNA, 33 bp, Homo sapien
acctctttaggatttaagctttagtaggtaagg

SEQ ID NO: 1062444 - DNA, 33 bp, Homo sapien
acctctttaggatttaggctttagtaggtaagg

SEQ ID NO: 1062445 - DNA, 33 bp, Homo sapien
agacattgctaaaaaaactaactcaagttcgtt

SEQ ID NO: 1062446 - DNA, 33 bp, Homo sapien
agacattgctaaaaaatctaactcaagttcgtt

SEQ ID NO: 1062447 - DNA, 33 bp, Homo sapien
cctgacaccttactaccgcaccaatgtaactcc

SEQ ID NO: 1062448 - DNA, 33 bp, Homo sapien
cctgacaccttactactgcaccaatgtaactcc

SEQ ID NO: 1062449 - DNA, 33 bp, Homo sapien
tatatacaaagatcaactacagatggattcaag

SEQ ID NO: 1062450 - DNA, 33 bp, Homo sapien
tatatacaaagatcaattacagatggattcaag

SEQ ID NO: 1062451 - DNA, 33 bp, Homo sapien
agattattttgtcatccagatattaagcctagt

SEQ ID NO: 1062452 - DNA, 33 bp, Homo sapien
agattattttgtcatctagatattaagcctagt

SEQ ID NO: 1062453 - DNA, 33 bp, Homo sapien
tgtggagaaggctaccagggaccatggtgtttc

SEQ ID NO: 1062454 - DNA, 33 bp, Homo sapien
tgtggagaaggctaccggggaccatggtgtttc

SEQ ID NO: 1062455 - DNA, 33 bp, Homo sapien
gtacttgtgggtcagccgcaactctaggactgg

SEQ ID NO: 1062456 - DNA, 33 bp, Homo sapien
gtacttgtgggtcagctgcaactctaggactgg

SEQ ID NO: 1062457 - DNA, 33 bp, Homo sapien
ggtcttctatagtggcagagccagtactagacc

SEQ ID NO: 1062458 - DNA, 33 bp, Homo sapien
ggtcttctatagtggctgagccagtactagacc

SEQ ID NO: 1062459 - DNA, 33 bp, Homo sapien
atcactgtgttggtaaaagcttgcaaagcatta

SEQ ID NO: 1062460 - DNA, 33 bp, Homo sapien
atcactgtgttggtaacagcttgcaaagcatta

SEQ ID NO: 1062461 - DNA, 33 bp, Homo sapien
ctgatgatccttactaaatataactatgatcaa

SEQ ID NO: 1062462 - DNA, 33 bp, Homo sapien
ctgatgatccttactagatataactatgatcaa

SEQ ID NO: 1062463 - DNA, 33 bp, Homo sapien
gctgtaatattgttacagagacaccagaagtta

SEQ ID NO: 1062464 - DNA, 33 bp, Homo sapien
gctgtaatattgttacggagacaccagaagtta

SEQ ID NO: 1062465 - DNA, 33 bp, Homo sapien
ttctgagtggcataaaagctatgtaaagatgga

SEQ ID NO: 1062466 - DNA, 33 bp, Homo sapien
ttctgagtggcataaaggctatgtaaagatgga

SEQ ID NO: 1062467 - DNA, 33 bp, Homo sapien
tagtctgttctttcaccgctatagagaactacc

SEQ ID NO: 1062468 - DNA, 33 bp, Homo sapien
tagtctgttctttcactgctatagagaactacc

SEQ ID NO: 1062469 - DNA, 33 bp, Homo sapien
tgagttgcactatggaaacatttctatgtttgg

SEQ ID NO: 1062470 - DNA, 33 bp, Homo sapien
tgagttgcactatggatacatttctatgtttgg

SEQ ID NO: 1062471 - DNA, 33 bp, Homo sapien
cccaatccagtcattcgcaaaaactataaaaca

SEQ ID NO: 1062472 - DNA, 33 bp, Homo sapien
cccaatccagtcattctcaaaaactataaaaca

SEQ ID NO: 1062473 - DNA, 33 bp, Homo sapien
gcagtctagaagtggaaaaggagatgtacttcc

SEQ ID NO: 1062474 - DNA, 33 bp, Homo sapien
gcagtctagaagtggataaggagatgtacttcc

SEQ ID NO: 1062475 - DNA, 33 bp, Homo sapien
aacatgatacaaaaaaattcaaacaaatgattc

SEQ ID NO: 1062476 - DNA, 33 bp, Homo sapien
aacatgatacaaaaaacttcaaacaaatgattc

SEQ ID NO: 1062477 - DNA, 33 bp, Homo sapien
aaccaaggttaaatacacagcaggaataaaaga

SEQ ID NO: 1062478 - DNA, 33 bp, Homo sapien
aaccaaggttaaatactcagcaggaataaaaga

SEQ ID NO: 1062479 - DNA, 33 bp, Homo sapien
ttgtttatgaatgaccaagtttcagataaaatc

SEQ ID NO: 1062480 - DNA, 33 bp, Homo sapien
ttgtttatgaatgaccgagtttcagataaaatc

SEQ ID NO: 1062481 - DNA, 33 bp, Homo sapien
tggctgaactggcactcaaaacacaagacgcag

SEQ ID NO: 1062482 - DNA, 33 bp, Homo sapien
tggctgaactggcactgaaaacacaagacgcag

SEQ ID NO: 1062483 - DNA, 33 bp, Homo sapien
caaaccgccagagctaaccacattatcaaagcc

SEQ ID NO: 1062484 - DNA, 33 bp, Homo sapien
caaaccgccagagctagccacattatcaaagcc

SEQ ID NO: 1062485 - DNA, 33 bp, Homo sapien
ttaagaactttttaaccgctgtagagaccactg

SEQ ID NO: 1062486 - DNA, 33 bp, Homo sapien
ttaagaactttttaactgctgtagagaccactg

SEQ ID NO: 1062487 - DNA, 33 bp, Homo sapien
gaatggttctcaaagaagtccaatgtgaagctg

SEQ ID NO: 1062488 - DNA, 33 bp, Homo sapien
gaatggttctcaaagaggtccaatgtgaagctg

SEQ ID NO: 1062489 - DNA, 33 bp, Homo sapien
ctgtagtttcaagttgcaatttgagtccttgag

SEQ ID NO: 1062490 - DNA, 33 bp, Homo sapien
ctgtagtttcaagttgtaatttgagtccttgag

SEQ ID NO: 1062491 - DNA, 33 bp, Homo sapien
gcttaaagaggttaaacagatcactccagtcac

SEQ ID NO: 1062492 - DNA, 33 bp, Homo sapien
gcttaaagaggttaaatagatcactccagtcac

SEQ ID NO: 1062493 - DNA, 33 bp, Homo sapien
caactaaggctgtcaacgtaacaggattttcat

SEQ ID NO: 1062494 - DNA, 33 bp, Homo sapien
caactaaggctgtcaaggtaacaggattttcat

SEQ ID NO: 1062495 - DNA, 33 bp, Homo sapien
aatcaggaactttaggaatatactgtgtacttt

SEQ ID NO: 1062496 - DNA, 33 bp, Homo sapien
aatcaggaactttagggatatactgtgtacttt

SEQ ID NO: 1062497 - DNA, 33 bp, Homo sapien
ttttcagctaccacaaatcctatctgaaaagag

SEQ ID NO: 1062498 - DNA, 33 bp, Homo sapien
ttttcagctaccacaagtcctatctgaaaagag

SEQ ID NO: 1062499 - DNA, 33 bp, Homo sapien
ctgaagaaccattacaatcagatttacatttat

SEQ ID NO: 1062500 - DNA, 33 bp, Homo sapien
ctgaagaaccattacagtcagatttacatttat

SEQ ID NO: 1062501 - DNA, 33 bp, Homo sapien
agtcatggtataaaaagtcaacgtaacaaaaat

SEQ ID NO: 1062502 - DNA, 33 bp, Homo sapien
agtcatggtataaaaattcaacgtaacaaaaat

SEQ ID NO: 1062503 - DNA, 33 bp, Homo sapien
tttgactctcataaacagctcttcttcaccttc

SEQ ID NO: 1062504 - DNA, 33 bp, Homo sapien
tttgactctcataaacggctcttcttcaccttc

SEQ ID NO: 1062505 - DNA, 33 bp, Homo sapien
agttgaggataagagacgaaggtgaagaagagc

SEQ ID NO: 1062506 - DNA, 33 bp, Homo sapien
agttgaggataagagatgaaggtgaagaagagc

SEQ ID NO: 1062507 - DNA, 33 bp, Homo sapien
acacttatgattactacacctatccttccctat

SEQ ID NO: 1062508 - DNA, 33 bp, Homo sapien
acacttatgattactatacctatccttccctat

SEQ ID NO: 1062509 - DNA, 33 bp, Homo sapien
gaagattctctgttcacgctatcgattctttcc

SEQ ID NO: 1062510 - DNA, 33 bp, Homo sapien
gaagattctctgttcatgctatcgattctttcc

SEQ ID NO: 1062511 - DNA, 33 bp, Homo sapien
ctgagttaacaagtccagctaatgagaaaaaaa

SEQ ID NO: 1062512 - DNA, 33 bp, Homo sapien
ctgagttaacaagtccggctaatgagaaaaaaa

SEQ ID NO: 1062513 - DNA, 33 bp, Homo sapien
cactattatacaagcaaaagcaaaaaagtgtat

SEQ ID NO: 1062514 - DNA, 33 bp, Homo sapien
cactattatacaagcacaagcaaaaaagtgtat

SEQ ID NO: 1062515 - DNA, 33 bp, Homo sapien
gcccaaagttctagaacaaaagaatggtttggg

SEQ ID NO: 1062516 - DNA, 33 bp, Homo sapien
gcccaaagttctagaagaaaagaatggtttggg

SEQ ID NO: 1062517 - DNA, 33 bp, Homo sapien
cagaaaatctgagacaagtccgaaaagaaagtt

SEQ ID NO: 1062518 - DNA, 33 bp, Homo sapien
cagaaaatctgagacaggtccgaaaagaaagtt

SEQ ID NO: 1062519 - DNA, 33 bp, Homo sapien
atctgtgctggtatcaaggtgttctaacagaat

SEQ ID NO: 1062520 - DNA, 33 bp, Homo sapien
atctgtgctggtatcagggtgttctaacagaat

SEQ ID NO: 1062521 - DNA, 33 bp, Homo sapien
aacacaatattaacaacggctatctctctttgg

SEQ ID NO: 1062522 - DNA, 33 bp, Homo sapien
aacacaatattaacaatggctatctctctttgg

SEQ ID NO: 1062523 - DNA, 33 bp, Homo sapien
aagcgaatgcggtaaaatgataacacaatgcat

SEQ ID NO: 1062524 - DNA, 33 bp, Homo sapien
aagcgaatgcggtaaagtgataacacaatgcat

SEQ ID NO: 1062525 - DNA, 33 bp, Homo sapien
tctgctttgcaaacaaaggaaatgatagcaaag

SEQ ID NO: 1062526 - DNA, 33 bp, Homo sapien
tctgctttgcaaacaacggaaatgatagcaaag

SEQ ID NO: 1062527 - DNA, 33 bp, Homo sapien
ccaactgaccctgctaaagattctggtattcta

SEQ ID NO: 1062528 - DNA, 33 bp, Homo sapien
ccaactgaccctgctagagattctggtattcta

SEQ ID NO: 1062529 - DNA, 33 bp, Homo sapien
ttatattcaatcaaatgaatcttcataaacaaa

SEQ ID NO: 1062530 - DNA, 33 bp, Homo sapien
ttatattcaatcaaattaatcttcataaacaaa

SEQ ID NO: 1062531 - DNA, 33 bp, Homo sapien
tatatgttatgtcatacagagctccaggaatca

SEQ ID NO: 1062532 - DNA, 33 bp, Homo sapien
tatatgttatgtcatatagagctccaggaatca

SEQ ID NO: 1062533 - DNA, 33 bp, Homo sapien
tcacttctgataactccatttaatgccctgtga

SEQ ID NO: 1062534 - DNA, 33 bp, Homo sapien
tcacttctgataactctatttaatgccctgtga

SEQ ID NO: 1062535 - DNA, 33 bp, Homo sapien
gcattgctgtcagagaatcccgcattatgggat

SEQ ID NO: 1062536 - DNA, 33 bp, Homo sapien
gcattgctgtcagagagtcccgcattatgggat

SEQ ID NO: 1062537 - DNA, 33 bp, Homo sapien
ttgtaaaatagctgaacgcaaaacaaaataaga

SEQ ID NO: 1062538 - DNA, 33 bp, Homo sapien
ttgtaaaatagctgaatgcaaaacaaaataaga

SEQ ID NO: 1062539 - DNA, 33 bp, Homo sapien
tgtctgtttactctccggagttttccttttgtt

SEQ ID NO: 1062540 - DNA, 33 bp, Homo sapien
tgtctgtttactctcctgagttttccttttgtt

SEQ ID NO: 1062541 - DNA, 33 bp, Homo sapien
ctaaagagcttccacacaacaaaaggaaaactc

SEQ ID NO: 1062542 - DNA, 33 bp, Homo sapien
ctaaagagcttccacagaacaaaaggaaaactc

SEQ ID NO: 1062543 - DNA, 33 bp, Homo sapien
acactcaggaaattcaatatggtgggttactca

SEQ ID NO: 1062544 - DNA, 33 bp, Homo sapien
acactcaggaaattcattatggtgggttactca

SEQ ID NO: 1062545 - DNA, 33 bp, Homo sapien
aaagaattgcctcagccaaatacaaaatagaaa

SEQ ID NO: 1062546 - DNA, 33 bp, Homo sapien
aaagaattgcctcagctaaatacaaaatagaaa

SEQ ID NO: 1062547 - DNA, 33 bp, Homo sapien
tccatacgccaatgacacaggcatagttggaaa

SEQ ID NO: 1062548 - DNA, 33 bp, Homo sapien
tccatacgccaatgacgcaggcatagttggaaa

SEQ ID NO: 1062549 - DNA, 33 bp, Homo sapien
ccaatgcaaaactccacatacagagtggctgtt

SEQ ID NO: 1062550 - DNA, 33 bp, Homo sapien
ccaatgcaaaactccagatacagagtggctgtt

SEQ ID NO: 1062551 - DNA, 33 bp, Homo sapien
ggtcagcaaagcattacggctaaagggagcttg

SEQ ID NO: 1062552 - DNA, 33 bp, Homo sapien
ggtcagcaaagcattatggctaaagggagcttg

SEQ ID NO: 1062553 - DNA, 33 bp, Homo sapien
ttatgaagcaccaataacatgtaaataaggttg

SEQ ID NO: 1062554 - DNA, 33 bp, Homo sapien
ttatgaagcaccaatagcatgtaaataaggttg

SEQ ID NO: 1062555 - DNA, 33 bp, Homo sapien
tctttggggtgcatgacagtgtccggccttctg

SEQ ID NO: 1062556 - DNA, 33 bp, Homo sapien
tctttggggtgcatgatagtgtccggccttctg

SEQ ID NO: 1062557 - DNA, 33 bp, Homo sapien
catctgttttaaatgcagagagattcaggatag

SEQ ID NO: 1062558 - DNA, 33 bp, Homo sapien
catctgttttaaatgcggagagattcaggatag

SEQ ID NO: 1062559 - DNA, 33 bp, Homo sapien
atggcaagctggttgacgttagctgttttgcag

SEQ ID NO: 1062560 - DNA, 33 bp, Homo sapien
atggcaagctggttgatgttagctgttttgcag

SEQ ID NO: 1062561 - DNA, 33 bp, Homo sapien
actttcaattacttacacataaatcctccaaat

SEQ ID NO: 1062562 - DNA, 33 bp, Homo sapien
actttcaattacttactcataaatcctccaaat

SEQ ID NO: 1062563 - DNA, 33 bp, Homo sapien
tacttcacactataaccggaaacctcacatatt

SEQ ID NO: 1062564 - DNA, 33 bp, Homo sapien
tacttcacactataactggaaacctcacatatt

SEQ ID NO: 1062565 - DNA, 33 bp, Homo sapien
gatgagattgtttagggagaccatacaaataac

SEQ ID NO: 1062566 - DNA, 33 bp, Homo sapien
gatgagattgtttaggtagaccatacaaataac

SEQ ID NO: 1062567 - DNA, 33 bp, Homo sapien
tttgcccttagttctgaatgtagacactctatc

SEQ ID NO: 1062568 - DNA, 33 bp, Homo sapien
tttgcccttagttctggatgtagacactctatc

SEQ ID NO: 1062569 - DNA, 33 bp, Homo sapien
ggcagcttgtttcttcaaatttagcaagagagt

SEQ ID NO: 1062570 - DNA, 33 bp, Homo sapien
ggcagcttgtttcttcgaatttagcaagagagt

SEQ ID NO: 1062571 - DNA, 33 bp, Homo sapien
catataccattacaccaaatcaactgtctgcat

SEQ ID NO: 1062572 - DNA, 33 bp, Homo sapien
catataccattacaccgaatcaactgtctgcat

SEQ ID NO: 1062573 - DNA, 33 bp, Homo sapien
tttttcaagcacataaacctaaggaaggaacta

SEQ ID NO: 1062574 - DNA, 33 bp, Homo sapien
tttttcaagcacataagcctaaggaaggaacta

SEQ ID NO: 1062575 - DNA, 33 bp, Homo sapien
cttccaaggaacataaatggaaatttgcgtaca

SEQ ID NO: 1062576 - DNA, 33 bp, Homo sapien
cttccaaggaacataattggaaatttgcgtaca

SEQ ID NO: 1062577 - DNA, 33 bp, Homo sapien
taaagttagaccatcactctttctgtcttatcc

SEQ ID NO: 1062578 - DNA, 33 bp, Homo sapien
taaagttagaccatcattctttctgtcttatcc

SEQ ID NO: 1062579 - DNA, 33 bp, Homo sapien
cacaagcttatagatggagggaatttttctcag

SEQ ID NO: 1062580 - DNA, 33 bp, Homo sapien
cacaagcttatagatgtagggaatttttctcag

SEQ ID NO: 1062581 - DNA, 33 bp, Homo sapien
gctggtatacagaaaaccgtgcatacaactcca

SEQ ID NO: 1062582 - DNA, 33 bp, Homo sapien
gctggtatacagaaaagcgtgcatacaactcca

SEQ ID NO: 1062583 - DNA, 33 bp, Homo sapien
catgcccacaggagaaagatatggtgaccaggg

SEQ ID NO: 1062584 - DNA, 33 bp, Homo sapien
catgcccacaggagaaggatatggtgaccaggg

SEQ ID NO: 1062585 - DNA, 33 bp, Homo sapien
gtaatgtattctgggtaacaatattctgggtaa

SEQ ID NO: 1062586 - DNA, 33 bp, Homo sapien
gtaatgtattctgggttacaatattctgggtaa

SEQ ID NO: 1062587 - DNA, 33 bp, Homo sapien
attccgctgtctactaactgtgcgatattgaga

SEQ ID NO: 1062588 - DNA, 33 bp, Homo sapien
attccgctgtctactagctgtgcgatattgaga

SEQ ID NO: 1062589 - DNA, 33 bp, Homo sapien
actagaggaagaatcacgaagagttcacatgag

SEQ ID NO: 1062590 - DNA, 33 bp, Homo sapien
actagaggaagaatcatgaagagttcacatgag

SEQ ID NO: 1062591 - DNA, 33 bp, Homo sapien
cttccacaaaatgaagaacttacaaaaattgag

SEQ ID NO: 1062592 - DNA, 33 bp, Homo sapien
cttccacaaaatgaaggacttacaaaaattgag

SEQ ID NO: 1062593 - DNA, 33 bp, Homo sapien
cacctctagcatgcacagtaactagaagggaag

SEQ ID NO: 1062594 - DNA, 33 bp, Homo sapien
cacctctagcatgcacggtaactagaagggaag

SEQ ID NO: 1062595 - DNA, 33 bp, Homo sapien
gcaaaaaaagtctgcaccgttgtaagagctatg

SEQ ID NO: 1062596 - DNA, 33 bp, Homo sapien
gcaaaaaaagtctgcagcgttgtaagagctatg

SEQ ID NO: 1062597 - DNA, 33 bp, Homo sapien
ataagtgagttataagcctctgaaatacaggtt

SEQ ID NO: 1062598 - DNA, 33 bp, Homo sapien
ataagtgagttataagtctctgaaatacaggtt

SEQ ID NO: 1062599 - DNA, 33 bp, Homo sapien
atccaattcaaatgtaaatcactgctgttttgg

SEQ ID NO: 1062600 - DNA, 33 bp, Homo sapien
atccaattcaaatgtatatcactgctgttttgg

SEQ ID NO: 1062601 - DNA, 33 bp, Homo sapien
cagtccttagtgcttaccaataaaatgtaacat

SEQ ID NO: 1062602 - DNA, 33 bp, Homo sapien
cagtccttagtgcttatcaataaaatgtaacat

SEQ ID NO: 1062603 - DNA, 33 bp, Homo sapien
tctttattagtggtgcacatttttttgctttgt

SEQ ID NO: 1062604 - DNA, 33 bp, Homo sapien
tctttattagtggtgcgcatttttttgctttgt

SEQ ID NO: 1062605 - DNA, 33 bp, Homo sapien
gtcttgaggaacaacacgtgacttccttgtatt

SEQ ID NO: 1062606 - DNA, 33 bp, Homo sapien
gtcttgaggaacaacatgtgacttccttgtatt

SEQ ID NO: 1062607 - DNA, 33 bp, Homo sapien
ggctgaagtatgtccaagtcctagtgctttgtg

SEQ ID NO: 1062608 - DNA, 33 bp, Homo sapien
ggctgaagtatgtccatgtcctagtgctttgtg

SEQ ID NO: 1062609 - DNA, 33 bp, Homo sapien
atagcagacgcacaaacagtagccagttccctt

SEQ ID NO: 1062610 - DNA, 33 bp, Homo sapien
atagcagacgcacaaatagtagccagttccctt

SEQ ID NO: 1062611 - DNA, 33 bp, Homo sapien
ttgacagggaaatctacgctaactctattgaaa

SEQ ID NO: 1062612 - DNA, 33 bp, Homo sapien
ttgacagggaaatctatgctaactctattgaaa

SEQ ID NO: 1062613 - DNA, 33 bp, Homo sapien
cctgaatctgtgaatacagtttgattttgtagc

SEQ ID NO: 1062614 - DNA, 33 bp, Homo sapien
cctgaatctgtgaatatagtttgattttgtagc

SEQ ID NO: 1062615 - DNA, 33 bp, Homo sapien
ttgactagagcacctacatatggcctctccaaa

SEQ ID NO: 1062616 - DNA, 33 bp, Homo sapien
ttgactagagcacctagatatggcctctccaaa

SEQ ID NO: 1062617 - DNA, 33 bp, Homo sapien
ttgtcatcatgtaatacgcttctttatcctttt

SEQ ID NO: 1062618 - DNA, 33 bp, Homo sapien
ttgtcatcatgtaatatgcttctttatcctttt

SEQ ID NO: 1062619 - DNA, 33 bp, Homo sapien
cttggtaggaaaagaactcagtgatatctctcc

SEQ ID NO: 1062620 - DNA, 33 bp, Homo sapien
cttggtaggaaaagaattcagtgatatctctcc

SEQ ID NO: 1062621 - DNA, 33 bp, Homo sapien
tacaataacaactgaaaacttaaacactctact

SEQ ID NO: 1062622 - DNA, 33 bp, Homo sapien
tacaataacaactgaagacttaaacactctact

SEQ ID NO: 1062623 - DNA, 33 bp, Homo sapien
tcatctgaaagttcaactcactggtaatagtac

SEQ ID NO: 1062624 - DNA, 33 bp, Homo sapien
tcatctgaaagttcaattcactggtaatagtac

SEQ ID NO: 1062625 - DNA, 33 bp, Homo sapien
gcctttagcaaggaaacagctttgttggcttat

SEQ ID NO: 1062626 - DNA, 33 bp, Homo sapien
gcctttagcaaggaaatagctttgttggcttat

SEQ ID NO: 1062627 - DNA, 33 bp, Homo sapien
attttataatcctcggcaaaatgcatttgcatt

SEQ ID NO: 1062628 - DNA, 33 bp, Homo sapien
attttataatcctcggtaaaatgcatttgcatt

SEQ ID NO: 1062629 - DNA, 33 bp, Homo sapien
caataccatttaggctaagagcaaatcactaac

SEQ ID NO: 1062630 - DNA, 33 bp, Homo sapien
caataccatttaggctgagagcaaatcactaac

SEQ ID NO: 1062631 - DNA, 33 bp, Homo sapien
ggttgtgacaaaaagaactccgagtccaacttc

SEQ ID NO: 1062632 - DNA, 33 bp, Homo sapien
ggttgtgacaaaaagagctccgagtccaacttc

SEQ ID NO: 1062633 - DNA, 33 bp, Homo sapien
aaagaatagaaatcagaatactaaaagatgtta

SEQ ID NO: 1062634 - DNA, 33 bp, Homo sapien
aaagaatagaaatcaggatactaaaagatgtta

SEQ ID NO: 1062635 - DNA, 33 bp, Homo sapien
tctctgttgtttggtcaacttagctgttatggc

SEQ ID NO: 1062636 - DNA, 33 bp, Homo sapien
tctctgttgtttggtctacttagctgttatggc

SEQ ID NO: 1062637 - DNA, 33 bp, Homo sapien
gtgggtggtttagctccatcacctgagagaatg

SEQ ID NO: 1062638 - DNA, 33 bp, Homo sapien
gtgggtggtttagctctatcacctgagagaatg

SEQ ID NO: 1062639 - DNA, 33 bp, Homo sapien
tgctgcttttaggatcacttatttatccttgat

SEQ ID NO: 1062640 - DNA, 33 bp, Homo sapien
tgctgcttttaggatcgcttatttatccttgat

SEQ ID NO: 1062641 - DNA, 33 bp, Homo sapien
aggcaggagctgttggaaatcatgttctgccat

SEQ ID NO: 1062642 - DNA, 33 bp, Homo sapien
aggcaggagctgttggcaatcatgttctgccat

SEQ ID NO: 1062643 - DNA, 33 bp, Homo sapien
ctgtcttttttgtcccaattgctcctatgtggg

SEQ ID NO: 1062644 - DNA, 33 bp, Homo sapien
ctgtcttttttgtcccgattgctcctatgtggg

SEQ ID NO: 1062645 - DNA, 33 bp, Homo sapien
atggaatttttgtgaactgcctgaaaaatgcag

SEQ ID NO: 1062646 - DNA, 33 bp, Homo sapien
atggaatttttgtgaagtgcctgaaaaatgcag

SEQ ID NO: 1062647 - DNA, 33 bp, Homo sapien
aactgatattaaggaaagatttgatgagtaaaa

SEQ ID NO: 1062648 - DNA, 33 bp, Homo sapien
aactgatattaaggaacgatttgatgagtaaaa

SEQ ID NO: 1062649 - DNA, 33 bp, Homo sapien
tttaagtatgatttaccggtgacagagtaagac

SEQ ID NO: 1062650 - DNA, 33 bp, Homo sapien
tttaagtatgatttacgggtgacagagtaagac

SEQ ID NO: 1062651 - DNA, 33 bp, Homo sapien
gccatgtgctctacaaattcttctttaacaata

SEQ ID NO: 1062652 - DNA, 33 bp, Homo sapien
gccatgtgctctacaagttcttctttaacaata

SEQ ID NO: 1062653 - DNA, 33 bp, Homo sapien
accccatccaggtaaaattatgtgaacactgaa

SEQ ID NO: 1062654 - DNA, 33 bp, Homo sapien
accccatccaggtaaacttatgtgaacactgaa

SEQ ID NO: 1062655 - DNA, 33 bp, Homo sapien
cttggggtttgtttaacatcttgaatccagaga

SEQ ID NO: 1062656 - DNA, 33 bp, Homo sapien
cttggggtttgtttaatatcttgaatccagaga

SEQ ID NO: 1062657 - DNA, 33 bp, Homo sapien
ccaccctttagatcaactagccagcttgctgga

SEQ ID NO: 1062658 - DNA, 33 bp, Homo sapien
ccaccctttagatcaattagccagcttgctgga

SEQ ID NO: 1062659 - DNA, 33 bp, Homo sapien
attttctgctaactgcaaaactctgtgtgtgtg

SEQ ID NO: 1062660 - DNA, 33 bp, Homo sapien
attttctgctaactgcgaaactctgtgtgtgtg

SEQ ID NO: 1062661 - DNA, 33 bp, Homo sapien
ccacagttctagtacagcagtcaaatgaagagt

SEQ ID NO: 1062662 - DNA, 33 bp, Homo sapien
ccacagttctagtacatcagtcaaatgaagagt

SEQ ID NO: 1062663 - DNA, 33 bp, Homo sapien
gccagatgaacaaaaaagagaggactcaaatac

SEQ ID NO: 1062664 - DNA, 33 bp, Homo sapien
gccagatgaacaaaaacgagaggactcaaatac

SEQ ID NO: 1062665 - DNA, 33 bp, Homo sapien
ttcatttgtaactatcacatcttccatatttga

SEQ ID NO: 1062666 - DNA, 33 bp, Homo sapien
ttcatttgtaactatcgcatcttccatatttga

SEQ ID NO: 1062667 - DNA, 33 bp, Homo sapien
tcactgctaagcatggaaaagattaagaaagca

SEQ ID NO: 1062668 - DNA, 33 bp, Homo sapien
tcactgctaagcatgggaaagattaagaaagca

SEQ ID NO: 1062669 - DNA, 33 bp, Homo sapien
tatgggtgtcaggtaacgtaattttcaatagaa

SEQ ID NO: 1062670 - DNA, 33 bp, Homo sapien
tatgggtgtcaggtaaggtaattttcaatagaa

SEQ ID NO: 1062671 - DNA, 33 bp, Homo sapien
tttaggtactatatcaacccaaatatgctactc

SEQ ID NO: 1062672 - DNA, 33 bp, Homo sapien
tttaggtactatatcagcccaaatatgctactc

SEQ ID NO: 1062673 - DNA, 33 bp, Homo sapien
aaattcagtgaaaaccacacttcaagtcctcac

SEQ ID NO: 1062674 - DNA, 33 bp, Homo sapien
aaattcagtgaaaaccgcacttcaagtcctcac

SEQ ID NO: 1062675 - DNA, 33 bp, Homo sapien
tttaagctaggctagactatgctataatattct

SEQ ID NO: 1062676 - DNA, 33 bp, Homo sapien
tttaagctaggctagagtatgctataatattct

SEQ ID NO: 1062677 - DNA, 33 bp, Homo sapien
tgtgatgaacataggagaacaggtgccttttct

SEQ ID NO: 1062678 - DNA, 33 bp, Homo sapien
tgtgatgaacataggataacaggtgccttttct

SEQ ID NO: 1062679 - DNA, 33 bp, Homo sapien
atctggactgccaagtcacgtttcttcaaacca

SEQ ID NO: 1062680 - DNA, 33 bp, Homo sapien
atctggactgccaagttacgtttcttcaaacca

SEQ ID NO: 1062681 - DNA, 33 bp, Homo sapien
tctctatactttttgccagttgaacattataga

SEQ ID NO: 1062682 - DNA, 33 bp, Homo sapien
tctctatactttttgctagttgaacattataga

SEQ ID NO: 1062683 - DNA, 33 bp, Homo sapien
gggatgctgacattaaaattaaaggtgtaaata

SEQ ID NO: 1062684 - DNA, 33 bp, Homo sapien
gggatgctgacattaacattaaaggtgtaaata

SEQ ID NO: 1062685 - DNA, 33 bp, Homo sapien
ggtcttatccaaatcagatatcagtgagactca

SEQ ID NO: 1062686 - DNA, 33 bp, Homo sapien
ggtcttatccaaatcatatatcagtgagactca

SEQ ID NO: 1062687 - DNA, 33 bp, Homo sapien
ctcatttccttataaaatctcactagaagcatc

SEQ ID NO: 1062688 - DNA, 33 bp, Homo sapien
ctcatttccttataaactctcactagaagcatc

SEQ ID NO: 1062689 - DNA, 33 bp, Homo sapien
tttaaatctactcccaggccaattctatcagcc

SEQ ID NO: 1062690 - DNA, 33 bp, Homo sapien
tttaaatctactcccatgccaattctatcagcc

SEQ ID NO: 1062691 - DNA, 33 bp, Homo sapien
aggccttcaagtgataagatgtggctcacttac

SEQ ID NO: 1062692 - DNA, 33 bp, Homo sapien
aggccttcaagtgataggatgtggctcacttac

SEQ ID NO: 1062693 - DNA, 33 bp, Homo sapien
ttagttcatatctataacttgcctactgtgact

SEQ ID NO: 1062694 - DNA, 33 bp, Homo sapien
ttagttcatatctatatcttgcctactgtgact

SEQ ID NO: 1062695 - DNA, 33 bp, Homo sapien
aatttcacacttggtgaattttaactgtgtaag

SEQ ID NO: 1062696 - DNA, 33 bp, Homo sapien
aatttcacacttggtgtattttaactgtgtaag

SEQ ID NO: 1062697 - DNA, 33 bp, Homo sapien
cttctggtttctgacaagcagttctagtcttct

SEQ ID NO: 1062698 - DNA, 33 bp, Homo sapien
cttctggtttctgacaggcagttctagtcttct

SEQ ID NO: 1062699 - DNA, 33 bp, Homo sapien
gaagctcatgggcataacattaatctaattatt

SEQ ID NO: 1062700 - DNA, 33 bp, Homo sapien
gaagctcatgggcatatcattaatctaattatt

SEQ ID NO: 1062701 - DNA, 33 bp, Homo sapien
agaggggaagagcctaacattctttgtgctttt

SEQ ID NO: 1062702 - DNA, 33 bp, Homo sapien
agaggggaagagcctagcattctttgtgctttt

SEQ ID NO: 1062703 - DNA, 33 bp, Homo sapien
cacatggccagagtgggatcaagagagagagac

SEQ ID NO: 1062704 - DNA, 33 bp, Homo sapien
cacatggccagagtggtatcaagagagagagac

SEQ ID NO: 1062705 - DNA, 33 bp, Homo sapien
agggtcagtgtgagataaaactacaggggacca

SEQ ID NO: 1062706 - DNA, 33 bp, Homo sapien
agggtcagtgtgagatcaaactacaggggacca

SEQ ID NO: 1062707 - DNA, 33 bp, Homo sapien
ctgctttctgtctctacataacttgtctgtttt

SEQ ID NO: 1062708 - DNA, 33 bp, Homo sapien
ctgctttctgtctctatataacttgtctgtttt

SEQ ID NO: 1062709 - DNA, 33 bp, Homo sapien
ttttacttcaattatcaagtgtctgtctttatg

SEQ ID NO: 1062710 - DNA, 33 bp, Homo sapien
ttttacttcaattatcgagtgtctgtctttatg

SEQ ID NO: 1062711 - DNA, 33 bp, Homo sapien
tggcttctaacagtaaaagagagaggagaaaat

SEQ ID NO: 1062712 - DNA, 33 bp, Homo sapien
tggcttctaacagtaagagagagaggagaaaat

SEQ ID NO: 1062713 - DNA, 33 bp, Homo sapien
ataaaatgtgtagtgtcaagcataaactttact

SEQ ID NO: 1062714 - DNA, 33 bp, Homo sapien
ataaaatgtgtagtgttaagcataaactttact

SEQ ID NO: 1062715 - DNA, 33 bp, Homo sapien
ctctatcaggcttctaacatgtactttaaattt

SEQ ID NO: 1062716 - DNA, 33 bp, Homo sapien
ctctatcaggcttctaccatgtactttaaattt

SEQ ID NO: 1062717 - DNA, 33 bp, Homo sapien
attaagtggtgaattccaccaggtatgtctcct

SEQ ID NO: 1062718 - DNA, 33 bp, Homo sapien
attaagtggtgaattcgaccaggtatgtctcct

SEQ ID NO: 1062719 - DNA, 33 bp, Homo sapien
cagtaagtactgggacaattgtaatggaggcct

SEQ ID NO: 1062720 - DNA, 33 bp, Homo sapien
cagtaagtactgggactattgtaatggaggcct

SEQ ID NO: 1062721 - DNA, 33 bp, Homo sapien
ataaatccaacacaaccgaactgcatttctctt

SEQ ID NO: 1062722 - DNA, 33 bp, Homo sapien
ataaatccaacacaactgaactgcatttctctt

SEQ ID NO: 1062723 - DNA, 33 bp, Homo sapien
tctcaatataagcagagagtagtgtcacagtta

SEQ ID NO: 1062724 - DNA, 33 bp, Homo sapien
tctcaatataagcagatagtagtgtcacagtta

SEQ ID NO: 1062725 - DNA, 33 bp, Homo sapien
aaactgaatcagttacaggtactgccatatttg

SEQ ID NO: 1062726 - DNA, 33 bp, Homo sapien
aaactgaatcagttacgggtactgccatatttg

SEQ ID NO: 1062727 - DNA, 33 bp, Homo sapien
aaaaataaatctgggacgaaacaaagtctaagc

SEQ ID NO: 1062728 - DNA, 33 bp, Homo sapien
aaaaataaatctgggatgaaacaaagtctaagc

SEQ ID NO: 1062729 - DNA, 33 bp, Homo sapien
tgcttgaactctgttaactttacttgtgtcagc

SEQ ID NO: 1062730 - DNA, 33 bp, Homo sapien
tgcttgaactctgttatctttacttgtgtcagc

SEQ ID NO: 1062731 - DNA, 33 bp, Homo sapien
ctcttggactatttccaaagatttactcccttt

SEQ ID NO: 1062732 - DNA, 33 bp, Homo sapien
ctcttggactatttcccaagatttactcccttt

SEQ ID NO: 1062733 - DNA, 33 bp, Homo sapien
tttacagtacaattgacccttgatgccttggca

SEQ ID NO: 1062734 - DNA, 33 bp, Homo sapien
tttacagtacaattgatccttgatgccttggca

SEQ ID NO: 1062735 - DNA, 33 bp, Homo sapien
ttgaacaaagtttcatcataccaaacaatatgc

SEQ ID NO: 1062736 - DNA, 33 bp, Homo sapien
ttgaacaaagtttcatgataccaaacaatatgc

SEQ ID NO: 1062737 - DNA, 33 bp, Homo sapien
agagtgggccacactacgccaatttacttcacc

SEQ ID NO: 1062738 - DNA, 33 bp, Homo sapien
agagtgggccacactatgccaatttacttcacc

SEQ ID NO: 1062739 - DNA, 33 bp, Homo sapien
catcccaccgttaagaaagtccctctctgtcca

SEQ ID NO: 1062740 - DNA, 33 bp, Homo sapien
catcccaccgttaagacagtccctctctgtcca

SEQ ID NO: 1062741 - DNA, 33 bp, Homo sapien
atgcctacaggcttaacaaaacatggaagccac

SEQ ID NO: 1062742 - DNA, 33 bp, Homo sapien
atgcctacaggcttaagaaaacatggaagccac

SEQ ID NO: 1062743 - DNA, 33 bp, Homo sapien
atattctcatccgacactgagtatgtgtatcta

SEQ ID NO: 1062744 - DNA, 33 bp, Homo sapien
atattctcatccgacagtgagtatgtgtatcta

SEQ ID NO: 1062745 - DNA, 33 bp, Homo sapien
tcaaatggaaactcaacataccaagttatgggc

SEQ ID NO: 1062746 - DNA, 33 bp, Homo sapien
tcaaatggaaactcaatataccaagttatgggc

SEQ ID NO: 1062747 - DNA, 33 bp, Homo sapien
ctgcttgtcaactaacaaaaggcacatcttaaa

SEQ ID NO: 1062748 - DNA, 33 bp, Homo sapien
ctgcttgtcaactaaccaaaggcacatcttaaa

SEQ ID NO: 1062749 - DNA, 33 bp, Homo sapien
ttttgaaggataaattaaaaaattcagcaaata

SEQ ID NO: 1062750 - DNA, 33 bp, Homo sapien
ttttgaaggataaatttaaaaattcagcaaata

SEQ ID NO: 1062751 - DNA, 33 bp, Homo sapien
ggctaatcagaaaaaaagggtacatctagttaa

SEQ ID NO: 1062752 - DNA, 33 bp, Homo sapien
ggctaatcagaaaaaacgggtacatctagttaa

SEQ ID NO: 1062753 - DNA, 33 bp, Homo sapien
tgtcccagattcagggcagaatagtgtgagggg

SEQ ID NO: 1062754 - DNA, 33 bp, Homo sapien
tgtcccagattcagggtagaatagtgtgagggg

SEQ ID NO: 1062755 - DNA, 33 bp, Homo sapien
ctgaacaacttcagtacatggcttcttgcatcg

SEQ ID NO: 1062756 - DNA, 33 bp, Homo sapien
ctgaacaacttcagtatatggcttcttgcatcg

SEQ ID NO: 1062757 - DNA, 33 bp, Homo sapien
tagtgattgtgaacaacggtgaatgtgctatac

SEQ ID NO: 1062758 - DNA, 33 bp, Homo sapien
tagtgattgtgaacaatggtgaatgtgctatac

SEQ ID NO: 1062759 - DNA, 33 bp, Homo sapien
ttaaataaatgtacaacggacatcagtggataa

SEQ ID NO: 1062760 - DNA, 33 bp, Homo sapien
ttaaataaatgtacaatggacatcagtggataa

SEQ ID NO: 1062761 - DNA, 33 bp, Homo sapien
cctgaagttgctagtcactactttcaaactttg

SEQ ID NO: 1062762 - DNA, 33 bp, Homo sapien
cctgaagttgctagtcgctactttcaaactttg

SEQ ID NO: 1062763 - DNA, 33 bp, Homo sapien
caatcttcagcgaattcaaaacaaccaaaatca

SEQ ID NO: 1062764 - DNA, 33 bp, Homo sapien
caatcttcagcgaatttaaaacaaccaaaatca

SEQ ID NO: 1062765 - DNA, 33 bp, Homo sapien
actgctttgaagggaagaatccagtcctgatag

SEQ ID NO: 1062766 - DNA, 33 bp, Homo sapien
actgctttgaagggaataatccagtcctgatag

SEQ ID NO: 1062767 - DNA, 33 bp, Homo sapien
atttatcacctgctaaatgaagagccataggtt

SEQ ID NO: 1062768 - DNA, 33 bp, Homo sapien
atttatcacctgctaactgaagagccataggtt

SEQ ID NO: 1062769 - DNA, 33 bp, Homo sapien
acctggatgttgttaaaagcattcaattttatg

SEQ ID NO: 1062770 - DNA, 33 bp, Homo sapien
acctggatgttgttaagagcattcaattttatg

SEQ ID NO: 1062771 - DNA, 33 bp, Homo sapien; identical to SEQ ID NO: 1062769

SEQ ID NO: 1062772 - DNA, 33 bp, Homo sapien; identical to SEQ ID NO: 1062770

SEQ ID NO: 1062773 - DNA, 33 bp, Homo sapien
tattaaactcaagctgaaaatctatgaaaatag

SEQ ID NO: 1062774 - DNA, 33 bp, Homo sapien
tattaaactcaagctgtaaatctatgaaaatag

SEQ ID NO: 1062775 - DNA, 33 bp, Homo sapien
gaagataccaaagagacaaaggaataccctaga

SEQ ID NO: 1062776 - DNA, 33 bp, Homo sapien
gaagataccaaagagagaaaggaataccctaga

SEQ ID NO: 1062777 - DNA, 33 bp, Homo sapien
aacatctgtctatatgcacatggcactatattt

SEQ ID NO: 1062778 - DNA, 33 bp, Homo sapien
aacatctgtctatatgtacatggcactatattt

SEQ ID NO: 1062779 - DNA, 33 bp, Homo sapien
aaataatattgcaataaatatgaaagtggacat

SEQ ID NO: 1062780 - DNA, 33 bp, Homo sapien
aaataatattgcaatacatatgaaagtggacat

SEQ ID NO: 1062781 - DNA, 33 bp, Homo sapien
aaactttattcacttacgaaggagacaatacct

SEQ ID NO: 1062782 - DNA, 33 bp, Homo sapien
aaactttattcacttatgaaggagacaatacct

SEQ ID NO: 1062783 - DNA, 33 bp, Homo sapien
ataaattggaatattacgacaacatttagtgta

SEQ ID NO: 1062784 - DNA, 33 bp, Homo sapien
ataaattggaatattaggacaacatttagtgta

SEQ ID NO: 1062785 - DNA, 33 bp, Homo sapien
ggaagaatagatgttacacgagtacagaggagg

SEQ ID NO: 1062786 - DNA, 33 bp, Homo sapien
ggaagaatagatgttatacgagtacagaggagg

SEQ ID NO: 1062787 - DNA, 33 bp, Homo sapien
ctccagcctgaatgacaatgtaagtctctgtct

SEQ ID NO: 1062788 - DNA, 33 bp, Homo sapien
ctccagcctgaatgacgatgtaagtctctgtct

SEQ ID NO: 1062789 - DNA, 33 bp, Homo sapien
ttttacaggcttatcaagaagcattgctaggag

SEQ ID NO: 1062790 - DNA, 33 bp, Homo sapien
ttttacaggcttatcaggaagcattgctaggag

SEQ ID NO: 1062791 - DNA, 33 bp, Homo sapien
tattcttggatctatgacacaacaaatcatgtt

SEQ ID NO: 1062792 - DNA, 33 bp, Homo sapien
tattcttggatctatgtcacaacaaatcatgtt

SEQ ID NO: 1062793 - DNA, 33 bp, Homo sapien
tgatcctgtgcataccgaatcctgtcacccaca

SEQ ID NO: 1062794 - DNA, 33 bp, Homo sapien
tgatcctgtgcatacctaatcctgtcacccaca

SEQ ID NO: 1062795 - DNA, 33 bp, Homo sapien
tttgttgcatgagatccgagaactctttcttgg

SEQ ID NO: 1062796 - DNA, 33 bp, Homo sapien
tttgttgcatgagatctgagaactctttcttgg

SEQ ID NO: 1062797 - DNA, 33 bp, Homo sapien
tgataaaccatactccaagatgaagtccccaga

SEQ ID NO: 1062798 - DNA, 33 bp, Homo sapien
tgataaaccatactccgagatgaagtccccaga

SEQ ID NO: 1062799 - DNA, 33 bp, Homo sapien
gtagccatccttctaccctcgatgaattgacct

SEQ ID NO: 1062800 - DNA, 33 bp, Homo sapien
gtagccatccttctactctcgatgaattgacct

SEQ ID NO: 1062801 - DNA, 33 bp, Homo sapien
aaagatcacctgaagaacaagacaattaggtta

SEQ ID NO: 1062802 - DNA, 33 bp, Homo sapien
aaagatcacctgaagagcaagacaattaggtta

SEQ ID NO: 1062803 - DNA, 33 bp, Homo sapien
gaattgctgatcaaaaaaaatctttaaatccac

SEQ ID NO: 1062804 - DNA, 33 bp, Homo sapien
gaattgctgatcaaaacaaatctttaaatccac

SEQ ID NO: 1062805 - DNA, 33 bp, Homo sapien
gtttatttgagttttacgaatggcatctcaaca

SEQ ID NO: 1062806 - DNA, 33 bp, Homo sapien
gtttatttgagttttaggaatggcatctcaaca

SEQ ID NO: 1062807 - DNA, 33 bp, Homo sapien
ttaataaacatgggtcaaattattggttacaat

SEQ ID NO: 1062808 - DNA, 33 bp, Homo sapien
ttaataaacatgggtcgaattattggttacaat

SEQ ID NO: 1062809 - DNA, 33 bp, Homo sapien
ttatcttttccagtataagtcattgaatgcaga

SEQ ID NO: 1062810 - DNA, 33 bp, Homo sapien
ttatcttttccagtatgagtcattgaatgcaga

SEQ ID NO: 1062811 - DNA, 33 bp, Homo sapien
atttgctttggatacacaattgtttctcttatg

SEQ ID NO: 1062812 - DNA, 33 bp, Homo sapien
atttgctttggatacataattgtttctcttatg

SEQ ID NO: 1062813 - DNA, 33 bp, Homo sapien
taacactaacatgtgccaaaaggaattttttaa

SEQ ID NO: 1062814 - DNA, 33 bp, Homo sapien
taacactaacatgtgctaaaaggaattttttaa

SEQ ID NO: 1062815 - DNA, 33 bp, Homo sapien
ttaactgaaatttggaacctggaagataaaggc

SEQ ID NO: 1062816 - DNA, 33 bp, Homo sapien
ttaactgaaatttggaccctggaagataaaggc

SEQ ID NO: 1062817 - DNA, 33 bp, Homo sapien
acattgaattttaataagtagatggtgcctaga

SEQ ID NO: 1062818 - DNA, 33 bp, Homo sapien
acattgaattttaatacgtagatggtgcctaga

SEQ ID NO: 1062819 - DNA, 33 bp, Homo sapien
caaaagaatcaaactcaacccatatctctcacc

SEQ ID NO: 1062820 - DNA, 33 bp, Homo sapien
caaaagaatcaaactcgacccatatctctcacc

SEQ ID NO: 1062821 - DNA, 33 bp, Homo sapien
atacttggatttaagaactgaaactaggccagg

SEQ ID NO: 1062822 - DNA, 33 bp, Homo sapien
atacttggatttaagacctgaaactaggccagg

SEQ ID NO: 1062823 - DNA, 33 bp, Homo sapien
ccaatggtagtgggaaatattgaactggacaca

SEQ ID NO: 1062824 - DNA, 33 bp, Homo sapien
ccaatggtagtgggaattattgaactggacaca

SEQ ID NO: 1062825 - DNA, 33 bp, Homo sapien
gtaattacactaactgcaaacaccaaataagat

SEQ ID NO: 1062826 - DNA, 33 bp, Homo sapien
gtaattacactaactggaaacaccaaataagat

SEQ ID NO: 1062827 - DNA, 33 bp, Homo sapien
gaaactaagatactagaactaaattttgatctt

SEQ ID NO: 1062828 - DNA, 33 bp, Homo sapien
gaaactaagatactaggactaaattttgatctt

SEQ ID NO: 1062829 - DNA, 33 bp, Homo sapien
aacttatttttaagacactctcattcatttcgt

SEQ ID NO: 1062830 - DNA, 33 bp, Homo sapien
aacttatttttaagactctctcattcatttcgt

SEQ ID NO: 1062831 - DNA, 33 bp, Homo sapien
tttgaaaacaggcaaaccagtgctagtacatag

SEQ ID NO: 1062832 - DNA, 33 bp, Homo sapien
tttgaaaacaggcaaatcagtgctagtacatag

SEQ ID NO: 1062833 - DNA, 33 bp, Homo sapien
ctcttttttatagacagtatacacaacacatat

SEQ ID NO: 1062834 - DNA, 33 bp, Homo sapien
ctcttttttatagacattatacacaacacatat

SEQ ID NO: 1062835 - DNA, 33 bp, Homo sapien
gaaaacaaaggaaagcaataagtggaaatttag

SEQ ID NO: 1062836 - DNA, 33 bp, Homo sapien
gaaaacaaaggaaagcgataagtggaaatttag

SEQ ID NO: 1062837 - DNA, 33 bp, Homo sapien
aaccaaatcagaaaaacaaatattcagcaaaat

SEQ ID NO: 1062838 - DNA, 33 bp, Homo sapien
aaccaaatcagaaaaagaaatattcagcaaaat

SEQ ID NO: 1062839 - DNA, 33 bp, Homo sapien
tgccaggcactgttaaacaatcagctctcacca

SEQ ID NO: 1062840 - DNA, 33 bp, Homo sapien
tgccaggcactgttaagcaatcagctctcacca

SEQ ID NO: 1062841 - DNA, 33 bp, Homo sapien
ctggaaattaagtttcaacatgaatcttgaggg

SEQ ID NO: 1062842 - DNA, 33 bp, Homo sapien
ctggaaattaagtttcgacatgaatcttgaggg

SEQ ID NO: 1062843 - DNA, 33 bp, Homo sapien
gcagaactccatagagactaaattcagtcattc

SEQ ID NO: 1062844 - DNA, 33 bp, Homo sapien
gcagaactccatagaggctaaattcagtcattc

SEQ ID NO: 1062845 - DNA, 33 bp, Homo sapien
tgcagataatcaatacaaaaataatcataataa

SEQ ID NO: 1062846 - DNA, 33 bp, Homo sapien
tgcagataatcaatacgaaaataatcataataa

SEQ ID NO: 1062847 - DNA, 33 bp, Homo sapien
gagaagaatcctaaaactcaaatgcaaccataa

SEQ ID NO: 1062848 - DNA, 33 bp, Homo sapien
gagaagaatcctaaaattcaaatgcaaccataa

SEQ ID NO: 1062849 - DNA, 33 bp, Homo sapien
aaacaaaacaagagaaaggataaggacagctga

SEQ ID NO: 1062850 - DNA, 33 bp, Homo sapien
aaacaaaacaagagaagggataaggacagctga

SEQ ID NO: 1062851 - DNA, 33 bp, Homo sapien
agctgtatttttcagaaactgtaatgaataaaa

SEQ ID NO: 1062852 - DNA, 33 bp, Homo sapien
agctgtatttttcagacactgtaatgaataaaa

SEQ ID NO: 1062853 - DNA, 33 bp, Homo sapien
ctcagtgacccagtgaactcagtgcttgggcta

SEQ ID NO: 1062854 - DNA, 33 bp, Homo sapien
ctcagtgacccagtgacctcagtgcttgggcta

SEQ ID NO: 1062855 - DNA, 33 bp, Homo sapien
aagttttcagtcaacaacgttttaggtaagaaa

SEQ ID NO: 1062856 - DNA, 33 bp, Homo sapien
aagttttcagtcaacagcgttttaggtaagaaa

SEQ ID NO: 1062857 - DNA, 33 bp, Homo sapien
ataggtgaacaacagaacaggtcttcaggatct

SEQ ID NO: 1062858 - DNA, 33 bp, Homo sapien
ataggtgaacaacagagcaggtcttcaggatct

SEQ ID NO: 1062859 - DNA, 33 bp, Homo sapien
tattttatatggtcgcacaaacacttggtctgt

SEQ ID NO: 1062860 - DNA, 33 bp, Homo sapien
tattttatatggtcgcgcaaacacttggtctgt

SEQ ID NO: 1062861 - DNA, 33 bp, Homo sapien
tgaaagaaggcagatacaaaataagactgtggt

SEQ ID NO: 1062862 - DNA, 33 bp, Homo sapien
tgaaagaaggcagatataaaataagactgtggt

SEQ ID NO: 1062863 - DNA, 33 bp, Homo sapien
ttttatttctccatcacgtatgaagcacatttt

SEQ ID NO: 1062864 - DNA, 33 bp, Homo sapien
ttttatttctccatcatgtatgaagcacatttt

SEQ ID NO: 1062865 - DNA, 33 bp, Homo sapien
ggtagaatgtatgatacgaatgtcaaagtcatt

SEQ ID NO: 1062866 - DNA, 33 bp, Homo sapien
ggtagaatgtatgatatgaatgtcaaagtcatt

SEQ ID NO: 1062867 - DNA, 33 bp, Homo sapien; identical to SEQ ID NO: 1062865

SEQ ID NO: 1062868 - DNA, 33 bp, Homo sapien; identical to SEQ ID NO: 1062866

SEQ ID NO: 1062869 - DNA, 33 bp, Homo sapien
tttggtgatacgtataaatagagttgtggagta

SEQ ID NO: 1062870 - DNA, 33 bp, Homo sapien
tttggtgatacgtatacatagagttgtggagta

SEQ ID NO: 1062871 - DNA, 33 bp, Homo sapien
tcaggtttttatgtcacctatgaattatctact

SEQ ID NO: 1062872 - DNA, 33 bp, Homo sapien
tcaggtttttatgtcagctatgaattatctact

SEQ ID NO: 1062873 - DNA, 33 bp, Homo sapien; identical to SEQ ID NO: 1062871

SEQ ID NO: 1062874 - DNA, 33 bp, Homo sapien; identical to SEQ ID NO: 1062872

SEQ ID NO: 1062875 - DNA, 33 bp, Homo sapien
tcagttttgcattctccaaaattactccagtga

SEQ ID NO: 1062876 - DNA, 33 bp, Homo sapien
tcagttttgcattctctaaaattactccagtga

SEQ ID NO: 1062877 - DNA, 33 bp, Homo sapien
gacgttggcttatgaaaagaatttatgacgaag

SEQ ID NO: 1062878 - DNA, 33 bp, Homo sapien
gacgttggcttatgaagagaatttatgacgaag

SEQ ID NO: 1062879 - DNA, 33 bp, Homo sapien
tctgactatatctcacaagtatctttggggaag

SEQ ID NO: 1062880 - DNA, 33 bp, Homo sapien
tctgactatatctcacgagtatctttggggaag

SEQ ID NO: 1062881 - DNA, 33 bp, Homo sapien
aatgttaagctagatcagaatttctgtaaagca

SEQ ID NO: 1062882 - DNA, 33 bp, Homo sapien
aatgttaagctagatctgaatttctgtaaagca

SEQ ID NO: 1062883 - DNA, 33 bp, Homo sapien
aatgtaattccaagcaaggaaaaaaaatgaagc

SEQ ID NO: 1062884 - DNA, 33 bp, Homo sapien
aatgtaattccaagcagggaaaaaaaatgaagc

SEQ ID NO: 1062885 - DNA, 33 bp, Homo sapien
aattgagagaaaagtacagagttgcaatacact

SEQ ID NO: 1062886 - DNA, 33 bp, Homo sapien
aattgagagaaaagtagagagttgcaatacact

SEQ ID NO: 1062887 - DNA, 33 bp, Homo sapien
tgaagtcaacctgatgaacaaaattagtagagt

SEQ ID NO: 1062888 - DNA, 33 bp, Homo sapien
tgaagtcaacctgatgcacaaaattagtagagt

SEQ ID NO: 1062889 - DNA, 33 bp, Homo sapien
cccttaaattacagaaaatgaatgaagtcaacc

SEQ ID NO: 1062890 - DNA, 33 bp, Homo sapien
cccttaaattacagaagatgaatgaagtcaacc

SEQ ID NO: 1062891 - DNA, 33 bp, Homo sapien
gaattggctcacagtaacacaaagcgaattccc

SEQ ID NO: 1062892 - DNA, 33 bp, Homo sapien
gaattggctcacagtatcacaaagcgaattccc

SEQ ID NO: 1062893 - DNA, 33 bp, Homo sapien
caaagcgaattcccacaataggctgtctgcaac

SEQ ID NO: 1062894 - DNA, 33 bp, Homo sapien
caaagcgaattcccacgataggctgtctgcaac

SEQ ID NO: 1062895 - DNA, 33 bp, Homo sapien
gaaaagttaatacccaatgaaatagtgtcaaga

SEQ ID NO: 1062896 - DNA, 33 bp, Homo sapien
gaaaagttaatacccagtgaaatagtgtcaaga

SEQ ID NO: 1062897 - DNA, 33 bp, Homo sapien
aataaactacctaataatacatctaacaaaaat

SEQ ID NO: 1062898 - DNA, 33 bp, Homo sapien
aataaactacctaatagtacatctaacaaaaat

SEQ ID NO: 1062899 - DNA, 33 bp, Homo sapien
tacaaaatagctgcaaaaagaataaaatattag

SEQ ID NO: 1062900 - DNA, 33 bp, Homo sapien
tacaaaatagctgcaacaagaataaaatattag

SEQ ID NO: 1062901 - DNA, 33 bp, Homo sapien; identical to SEQ ID NO: 1062899

SEQ ID NO: 1062902 - DNA, 33 bp, Homo sapien; identical to SEQ ID NO: 1062900

SEQ ID NO: 1062903 - DNA, 33 bp, Homo sapien
atcctgcattgttacaaaagtatgggtgattat

SEQ ID NO: 1062904 - DNA, 33 bp, Homo sapien
atcctgcattgttacagaagtatgggtgattat

SEQ ID NO: 1062905 - DNA, 33 bp, Homo sapien
ttacattcagccaggaacttattattatccatt

SEQ ID NO: 1062906 - DNA, 33 bp, Homo sapien
ttacattcagccaggagcttattattatccatt

SEQ ID NO: 1062907 - DNA, 33 bp, Homo sapien; identical to SEQ ID NO: 1062905

SEQ ID NO: 1062908 - DNA, 33 bp, Homo sapien; identical to SEQ ID NO: 1062906

SEQ ID NO: 1062909 - DNA, 33 bp, Homo sapien
ctatatgtaatgtaaaacgaacacacttgcaaa

SEQ ID NO: 1062910 - DNA, 33 bp, Homo sapien
ctatatgtaatgtaaaccgaacacacttgcaaa

SEQ ID NO: 1062911 - DNA, 33 bp, Homo sapien
gggttatgatataatacgtacctcatagaggca

SEQ ID NO: 1062912 - DNA, 33 bp, Homo sapien
gggttatgatataatatgtacctcatagaggca

SEQ ID NO: 1062913 - DNA, 33 bp, Homo sapien
tcaaatttcgtcactaaattattgacataaata

SEQ ID NO: 1062914 - DNA, 33 bp, Homo sapien
tcaaatttcgtcactagattattgacataaata

SEQ ID NO: 1062915 - DNA, 33 bp, Homo sapien; identical to SEQ ID NO: 1062913

SEQ ID NO: 1062916 - DNA, 33 bp, Homo sapien; identical to SEQ ID NO: 1062914

SEQ ID NO: 1062917 - DNA, 33 bp, Homo sapien
atttgtattactctaagggatagtgatgttgag

SEQ ID NO: 1062918 - DNA, 33 bp, Homo sapien
atttgtattactctaatggatagtgatgttgag

SEQ ID NO: 1062919 - DNA, 33 bp, Homo sapien; identical to SEQ ID NO: 1062917

SEQ ID NO: 1062920 - DNA, 33 bp, Homo sapien; identical to SEQ ID NO: 1062918

SEQ ID NO: 1062921 - DNA, 33 bp, Homo sapien
aagaagttatcatacactatgaggcagagtggg

SEQ ID NO: 1062922 - DNA, 33 bp, Homo sapien
aagaagttatcatacagtatgaggcagagtggg

SEQ ID NO: 1062923 - DNA, 33 bp, Homo sapien
cttcataaaaccattgcatcttgtgagaagtca

SEQ ID NO: 1062924 - DNA, 33 bp, Homo sapien
cttcataaaaccattggatcttgtgagaagtca

SEQ ID NO: 1062925 - DNA, 33 bp, Homo sapien
cttgctactgctccagacacataagacatactt

SEQ ID NO: 1062926 - DNA, 33 bp, Homo sapien
cttgctactgctccagccacataagacatactt

SEQ ID NO: 1062927 - DNA, 33 bp, Homo sapien
gagtggggaggaactacgcactttcaaatgacc

SEQ ID NO: 1062928 - DNA, 33 bp, Homo sapien
gagtggggaggaactatgcactttcaaatgacc

SEQ ID NO: 1062929 - DNA, 33 bp, Homo sapien; identical to SEQ ID NO: 1062927

SEQ ID NO: 1062930 - DNA, 33 bp, Homo sapien; identical to SEQ ID NO: 1062928

SEQ ID NO: 1062931 - DNA, 33 bp, Homo sapien
tattacagatgttctccatcaggttgaggaagt

SEQ ID NO: 1062932 - DNA, 33 bp, Homo sapien
tattacagatgttctctatcaggttgaggaagt

SEQ ID NO: 1062933 - DNA, 33 bp, Homo sapien
caggactagaaatagaaagtagacagcagcaat

SEQ ID NO: 1062934 - DNA, 33 bp, Homo sapien
caggactagaaatagagagtagacagcagcaat

SEQ ID NO: 1062935 - DNA, 33 bp, Homo sapien
agaagaatttgaggcacgataagtaagattagg

SEQ ID NO: 1062936 - DNA, 33 bp, Homo sapien
agaagaatttgaggcatgataagtaagattagg

SEQ ID NO: 1062937 - DNA, 33 bp, Homo sapien
gccactactaatatgacaggcagtaattcttgc

SEQ ID NO: 1062938 - DNA, 33 bp, Homo sapien
gccactactaatatgataggcagtaattcttgc

SEQ ID NO: 1062939 - DNA, 33 bp, Homo sapien; identical to SEQ ID NO: 1062937

SEQ ID NO: 1062940 - DNA, 33 bp, Homo sapien; identical to SEQ ID NO: 1062938

SEQ ID NO: 1062941 - DNA, 33 bp, Homo sapien
ggaaagaaaggtgaaacgcctaaggacatcagg

SEQ ID NO: 1062942 - DNA, 33 bp, Homo sapien
ggaaagaaaggtgaaatgcctaaggacatcagg

SEQ ID NO: 1062943 - DNA, 33 bp, Homo sapien
tcaatgtcactgtcaacgaaaagagccaaactc

SEQ ID NO: 1062944 - DNA, 33 bp, Homo sapien
tcaatgtcactgtcaaggaaaagagccaaactc

SEQ ID NO: 1062945 - DNA, 33 bp, Homo sapien
atgtaacatgatgagacaggcactaggtatatt

SEQ ID NO: 1062946 - DNA, 33 bp, Homo sapien
atgtaacatgatgagataggcactaggtatatt

SEQ ID NO: 1062947 - DNA, 33 bp, Homo sapien
tgccttactctcatccccgcaaacccacaagtg

SEQ ID NO: 1062948 - DNA, 33 bp, Homo sapien
tgccttactctcatcctcgcaaacccacaagtg

SEQ ID NO: 1062949 - DNA, 33 bp, Homo sapien
ccactctacattctagcctaccccttctagtcc

SEQ ID NO: 1062950 - DNA, 33 bp, Homo sapien
ccactctacattctagtctaccccttctagtcc

SEQ ID NO: 1062951 - DNA, 33 bp, Homo sapien
tttccacacagtcatgaaggggagctcccgttt

SEQ ID NO: 1062952 - DNA, 33 bp, Homo sapien
tttccacacagtcatggaggggagctcccgttt

SEQ ID NO: 1062953 - DNA, 33 bp, Homo sapien
gctcaactatgtagacaatctccttttagtagc

SEQ ID NO: 1062954 - DNA, 33 bp, Homo sapien
gctcaactatgtagacgatctccttttagtagc

SEQ ID NO: 1062955 - DNA, 33 bp, Homo sapien
gttctacccgctttcaagccgctgcatttcaca

SEQ ID NO: 1062956 - DNA, 33 bp, Homo sapien
gttctacccgctttcacgccgctgcatttcaca

SEQ ID NO: 1062957 - DNA, 33 bp, Homo sapien
catttctttggtatgaacagcttacctctttaa

SEQ ID NO: 1062958 - DNA, 33 bp, Homo sapien
catttctttggtatgagcagcttacctctttaa

SEQ ID NO: 1062959 - DNA, 33 bp, Homo sapien
atttactatttattatgactgatgtctactatc

SEQ ID NO: 1062960 - DNA, 33 bp, Homo sapien
atttactatttattattactgatgtctactatc

SEQ ID NO: 1062961 - DNA, 33 bp, Homo sapien
actgaataccatataaagttaatgctatggaaa

SEQ ID NO: 1062962 - DNA, 33 bp, Homo sapien
actgaataccatataatgttaatgctatggaaa

SEQ ID NO: 1062963 - DNA, 33 bp, Homo sapien
acactgtattagtccactctcacattactataa

SEQ ID NO: 1062964 - DNA, 33 bp, Homo sapien
acactgtattagtccattctcacattactataa

SEQ ID NO: 1062965 - DNA, 33 bp, Homo sapien; identical to SEQ ID NO: 1062963

SEQ ID NO: 1062966 - DNA, 33 bp, Homo sapien; identical to SEQ ID NO: 1062964

SEQ ID NO: 1062967 - DNA, 33 bp, Homo sapien
ccacatggctaagctacaaatatccctactatg

SEQ ID NO: 1062968 - DNA, 33 bp, Homo sapien
ccacatggctaagctataaatatccctactatg

SEQ ID NO: 1062969 - DNA, 33 bp, Homo sapien
ggagaaaatggcttaactggccaggcccagggc

SEQ ID NO: 1062970 - DNA, 33 bp, Homo sapien
ggagaaaatggcttaattggccaggcccagggc

SEQ ID NO: 1062971 - DNA, 33 bp, Homo sapien
agactatgaaaaaaaaatcctaccaatctcact

SEQ ID NO: 1062972 - DNA, 33 bp, Homo sapien
agactatgaaaaaaaactcctaccaatctcact

SEQ ID NO: 1062973 - DNA, 33 bp, Homo sapien
ttacaggaaagctgaaaagacagtacagaggat

SEQ ID NO: 1062974 - DNA, 33 bp, Homo sapien
ttacaggaaagctgaacagacagtacagaggat

SEQ ID NO: 1062975 - DNA, 33 bp, Homo sapien
atttgcaaaagacccacatgaaaaaggacagta

SEQ ID NO: 1062976 - DNA, 33 bp, Homo sapien
atttgcaaaagacccatatgaaaaaggacagta

SEQ ID NO: 1062977 - DNA, 33 bp, Homo sapien
ttctctgatgtgttaccatacaaactttattgt

SEQ ID NO: 1062978 - DNA, 33 bp, Homo sapien
ttctctgatgtgttactatacaaactttattgt

SEQ ID NO: 1062979 - DNA, 33 bp, Homo sapien
tataaaatctggtgagaagaatacattattttt

SEQ ID NO: 1062980 - DNA, 33 bp, Homo sapien
tataaaatctggtgaggagaatacattattttt

SEQ ID NO: 1062981 - DNA, 33 bp, Homo sapien
cctttggttgtatatgcacaagtggaattgctg

SEQ ID NO: 1062982 - DNA, 33 bp, Homo sapien
cctttggttgtatatggacaagtggaattgctg

SEQ ID NO: 1062983 - DNA, 33 bp, Homo sapien
ctctctatcttcataccgtactctttagaagaa

SEQ ID NO: 1062984 - DNA, 33 bp, Homo sapien
ctctctatcttcatactgtactctttagaagaa

SEQ ID NO: 1062985 - DNA, 33 bp, Homo sapien
aaaaagttgtatggccacatcaataaatgcagg

SEQ ID NO: 1062986 - DNA, 33 bp, Homo sapien
aaaaagttgtatggccgcatcaataaatgcagg

SEQ ID NO: 1062987 - DNA, 33 bp, Homo sapien
gaaagcaactcaattgcagatctcaagtctaaa

SEQ ID NO: 1062988 - DNA, 33 bp, Homo sapien
gaaagcaactcaattgtagatctcaagtctaaa

SEQ ID NO: 1062989 - DNA, 33 bp, Homo sapien; identical to SEQ ID NO: 1062987

SEQ ID NO: 1062990 - DNA, 33 bp, Homo sapien; identical to SEQ ID NO: 1062988

SEQ ID NO: 1062991 - DNA, 33 bp, Homo sapien
atggactaagacagagaatcggtaccaggaagt

SEQ ID NO: 1062992 - DNA, 33 bp, Homo sapien
atggactaagacagagcatcggtaccaggaagt

SEQ ID NO: 1062993 - DNA, 33 bp, Homo sapien; identical to SEQ ID NO: 1062991

SEQ ID NO: 1062994 - DNA, 33 bp, Homo sapien; identical to SEQ ID NO: 1062992

SEQ ID NO: 1062995 - DNA, 33 bp, Homo sapien
ataaatgtagttcataccaataattccaaaagt

SEQ ID NO: 1062996 - DNA, 33 bp, Homo sapien
ataaatgtagttcatatcaataattccaaaagt

SEQ ID NO: 1062997 - DNA, 33 bp, Homo sapien
aaccagtgacatttgaacaactaactgacttta

SEQ ID NO: 1062998 - DNA, 33 bp, Homo sapien
aaccagtgacatttgagcaactaactgacttta

SEQ ID NO: 1062999 - DNA, 33 bp, Homo sapien
caattactaatattgacacattcttagtgttaa

SEQ ID NO: 1063000 - DNA, 33 bp, Homo sapien
caattactaatattgagacattcttagtgttaa

SEQ ID NO: 1063001 - DNA, 33 bp, Homo sapien
aagacccatccattgcagagatactgaatcaaa

SEQ ID NO: 1063002 - DNA, 33 bp, Homo sapien
aagacccatccattgcggagatactgaatcaaa

SEQ ID NO: 1063003 - DNA, 33 bp, Homo sapien; identical to SEQ ID NO: 1063001

SEQ ID NO: 1063004 - DNA, 33 bp, Homo sapien; identical to SEQ ID NO: 1063002

SEQ ID NO: 1063005 - DNA, 33 bp, Homo sapien
acttatcggttaaacacgtagaccacttatgaa

SEQ ID NO: 1063006 - DNA, 33 bp, Homo sapien
acttatcggttaaacatgtagaccacttatgaa

SEQ ID NO: 1063007 - DNA, 33 bp, Homo sapien
tatttacctttattacaaagataagcccaaata

SEQ ID NO: 1063008 - DNA, 33 bp, Homo sapien
tatttacctttattacgaagataagcccaaata

SEQ ID NO: 1063009 - DNA, 33 bp, Homo sapien
cctctcctgtcttcaaatagaaggaagcagtct

SEQ ID NO: 1063010 - DNA, 33 bp, Homo sapien
cctctcctgtcttcaagtagaaggaagcagtct

SEQ ID NO: 1063011 - DNA, 33 bp, Homo sapien
gcttctgaagtaacagacaagcaaggaaggttt

SEQ ID NO: 1063012 - DNA, 33 bp, Homo sapien
gcttctgaagtaacaggcaagcaaggaaggttt

SEQ ID NO: 1063013 - DNA, 33 bp, Homo sapien
ctctgaatcgcccaaaaatttcaggaatgaagc

SEQ ID NO: 1063014 - DNA, 33 bp, Homo sapien
ctctgaatcgcccaaagatttcaggaatgaagc

SEQ ID NO: 1063015 - DNA, 33 bp, Homo sapien
aaagaacacgagtgaaaatatcccttatgacta

SEQ ID NO: 1063016 - DNA, 33 bp, Homo sapien
aaagaacacgagtgaagatatcccttatgacta

SEQ ID NO: 1063017 - DNA, 33 bp, Homo sapien
gtgtcctgttggcaaggagagttgtgtagataa

SEQ ID NO: 1063018 - DNA, 33 bp, Homo sapien
gtgtcctgttggcaagtagagttgtgtagataa

SEQ ID NO: 1063019 - DNA, 33 bp, Homo sapien
attaagcagaccaccaatgacatcttttgaaac

SEQ ID NO: 1063020 - DNA, 33 bp, Homo sapien
attaagcagaccaccagtgacatcttttgaaac

SEQ ID NO: 1063021 - DNA, 33 bp, Homo sapien
actacagaacagaggggatatgggaatgaacaa

SEQ ID NO: 1063022 - DNA, 33 bp, Homo sapien
actacagaacagagggtatatgggaatgaacaa

SEQ ID NO: 1063023 - DNA, 33 bp, Homo sapien
ttttgtacctgtctaaagatagaggtgaatatc

SEQ ID NO: 1063024 - DNA, 33 bp, Homo sapien
ttttgtacctgtctaaggatagaggtgaatatc

SEQ ID NO: 1063025 - DNA, 33 bp, Homo sapien
tagcaggtccctgggaagttgtaggacacctgg

SEQ ID NO: 1063026 - DNA, 33 bp, Homo sapien
tagcaggtccctgggatgttgtaggacacctgg

SEQ ID NO: 1063027 - DNA, 33 bp, Homo sapien
ctcttctcagacagtacctgactggggactctg

SEQ ID NO: 1063028 - DNA, 33 bp, Homo sapien
ctcttctcagacagtagctgactggggactctg

SEQ ID NO: 1063029 - DNA, 33 bp, Homo sapien
tgctgtgtactaagaacagaagaagcttcactt

SEQ ID NO: 1063030 - DNA, 33 bp, Homo sapien
tgctgtgtactaagaatagaagaagcttcactt

SEQ ID NO: 1063031 - DNA, 33 bp, Homo sapien
gtttccagtgaacagaagaaaacgttcagtaat

SEQ ID NO: 1063032 - DNA, 33 bp, Homo sapien
gtttccagtgaacagaggaaaacgttcagtaat

SEQ ID NO: 1063033 - DNA, 33 bp, Homo sapien
aaaccctgcaacactcaaatttcctatatagca

SEQ ID NO: 1063034 - DNA, 33 bp, Homo sapien
aaaccctgcaacactccaatttcctatatagca

SEQ ID NO: 1063035 - DNA, 33 bp, Homo sapien
atgtgaatactcattaacgcacaatttttatgc

SEQ ID NO: 1063036 - DNA, 33 bp, Homo sapien
atgtgaatactcattagcgcacaatttttatgc

SEQ ID NO: 1063037 - DNA, 33 bp, Homo sapien
aagttgaacagctctccgaaaccaaaaagcagt

SEQ ID NO: 1063038 - DNA, 33 bp, Homo sapien
aagttgaacagctctctgaaaccaaaaagcagt

SEQ ID NO: 1063039 - DNA, 33 bp, Homo sapien
agaggtgtgcaaattcacaacagccacttgttc

SEQ ID NO: 1063040 - DNA, 33 bp, Homo sapien
agaggtgtgcaaattctcaacagccacttgttc

SEQ ID NO: 1063041 - DNA, 33 bp, Homo sapien
atgtagagtcttaaaaatgttatagaaccagtc

SEQ ID NO: 1063042 - DNA, 33 bp, Homo sapien
atgtagagtcttaaaagtgttatagaaccagtc

SEQ ID NO: 1063043 - DNA, 33 bp, Homo sapien
gtattaaggcattttacagtgcttattctgtgt

SEQ ID NO: 1063044 - DNA, 33 bp, Homo sapien
gtattaaggcattttatagtgcttattctgtgt

SEQ ID NO: 1063045 - DNA, 33 bp, Homo sapien
cttgtagcatttttaccgagataaaattaacat

SEQ ID NO: 1063046 - DNA, 33 bp, Homo sapien
cttgtagcatttttactgagataaaattaacat

SEQ ID NO: 1063047 - DNA, 33 bp, Homo sapien
ctcctttagtcagtcagcttttataaatttgta

SEQ ID NO: 1063048 - DNA, 33 bp, Homo sapien
ctcctttagtcagtcatcttttataaatttgta

SEQ ID NO: 1063049 - DNA, 33 bp, Homo sapien
gaaactacagttaacgaaaatatattgtatatt

SEQ ID NO: 1063050 - DNA, 33 bp, Homo sapien
gaaactacagttaacgcaaatatattgtatatt

SEQ ID NO: 1063051 - DNA, 33 bp, Homo sapien
atgttcacaagcaataagaaatcatctgaaggt

SEQ ID NO: 1063052 - DNA, 33 bp, Homo sapien
atgttcacaagcaataggaaatcatctgaaggt

SEQ ID NO: 1063053 - DNA, 33 bp, Homo sapien
ggatatacattgaaaccaagtgttcattgtgac

SEQ ID NO: 1063054 - DNA, 33 bp, Homo sapien
ggatatacattgaaactaagtgttcattgtgac

SEQ ID NO: 1063055 - DNA, 33 bp, Homo sapien
aaaagcaaaaataatcaaatgtgactatatatg

SEQ ID NO: 1063056 - DNA, 33 bp, Homo sapien
aaaagcaaaaataatcgaatgtgactatatatg

SEQ ID NO: 1063057 - DNA, 33 bp, Homo sapien; identical to SEQ ID NO: 1063055

SEQ ID NO: 1063058 - DNA, 33 bp, Homo sapien; identical to SEQ ID NO: 1063056

SEQ ID NO: 1063059 - DNA, 33 bp, Homo sapien
tatgtatgaaattctgcactgtatgtcactgag

SEQ ID NO: 1063060 - DNA, 33 bp, Homo sapien
tatgtatgaaattctgtactgtatgtcactgag

SEQ ID NO: 1063061 - DNA, 33 bp, Homo sapien
agggtttggtgtggtaacatctctagtggagca

SEQ ID NO: 1063062 - DNA, 33 bp, Homo sapien
agggtttggtgtggtagcatctctagtggagca

SEQ ID NO: 1063063 - DNA, 33 bp, Homo sapien
gacacatatggcccaaactaactcttcacggta

SEQ ID NO: 1063064 - DNA, 33 bp, Homo sapien
gacacatatggcccaagctaactcttcacggta

SEQ ID NO: 1063065 - DNA, 33 bp, Homo sapien
ccccaggtcgatgccaactaggattacaatacc

SEQ ID NO: 1063066 - DNA, 33 bp, Homo sapien
ccccaggtcgatgccagctaggattacaatacc

SEQ ID NO: 1063067 - DNA, 33 bp, Homo sapien
taaggtcatacagacaagtaatacagggtgacc

SEQ ID NO: 1063068 - DNA, 33 bp, Homo sapien
taaggtcatacagacaggtaatacagggtgacc

SEQ ID NO: 1063069 - DNA, 33 bp, Homo sapien
tgttgcagaatgctccaaacgagagtcattata

SEQ ID NO: 1063070 - DNA, 33 bp, Homo sapien
tgttgcagaatgctccgaacgagagtcattata

SEQ ID NO: 1063071 - DNA, 33 bp, Homo sapien; identical to SEQ ID NO: 1063069

SEQ ID NO: 1063072 - DNA, 33 bp, Homo sapien; identical to SEQ ID NO: 1063070

SEQ ID NO: 1063073 - DNA, 33 bp, Homo sapien
cgatatgcaaataaaggccaatagagaagatta

SEQ ID NO: 1063074 - DNA, 33 bp, Homo sapien
cgatatgcaaataaagtccaatagagaagatta

SEQ ID NO: 1063075 - DNA, 33 bp, Homo sapien; identical to SEQ ID NO: 1063073

SEQ ID NO: 1063076 - DNA, 33 bp, Homo sapien; identical to SEQ ID NO: 1063074

SEQ ID NO: 1063077 - DNA, 33 bp, Homo sapien
acagataaaaggttaaatatctccacaggtggc

SEQ ID NO: 1063078 - DNA, 33 bp, Homo sapien
acagataaaaggttaactatctccacaggtggc

SEQ ID NO: 1063079 - DNA, 33 bp, Homo sapien
catagactggatacctcaaacaacagaaattta

SEQ ID NO: 1063080 - DNA, 33 bp, Homo sapien
catagactggataccttaaacaacagaaattta

SEQ ID NO: 1063081 - DNA, 33 bp, Homo sapien; identical to SEQ ID NO: 1063079

SEQ ID NO: 1063082 - DNA, 33 bp, Homo sapien; identical to SEQ ID NO: 1063080

SEQ ID NO: 1063083 - DNA, 33 bp, Homo sapien
atatgagggaaagacaggctgatatatgctaca

SEQ ID NO: 1063084 - DNA, 33 bp, Homo sapien
atatgagggaaagacatgctgatatatgctaca

SEQ ID NO: 1063085 - DNA, 33 bp, Homo sapien
ttccaggggtgcttaacgctttcaaaactttgc

SEQ ID NO: 1063086 - DNA, 33 bp, Homo sapien
ttccaggggtgcttaatgctttcaaaactttgc

SEQ ID NO: 1063087 - DNA, 33 bp, Homo sapien
aaaatccaaagagtcccgctaggagttgtacct

SEQ ID NO: 1063088 - DNA, 33 bp, Homo sapien
aaaatccaaagagtcctgctaggagttgtacct

SEQ ID NO: 1063089 - DNA, 33 bp, Homo sapien; identical to SEQ ID NO: 1063087

SEQ ID NO: 1063090 - DNA, 33 bp, Homo sapien; identical to SEQ ID NO: 1063088

SEQ ID NO: 1063091 - DNA, 33 bp, Homo sapien
tcaaaggcatagtctacctaaactgaaaaaaac

SEQ ID NO: 1063092 - DNA, 33 bp, Homo sapien
tcaaaggcatagtctatctaaactgaaaaaaac

SEQ ID NO: 1063093 - DNA, 33 bp, Homo sapien
ctgacacaaggtaccagctcagccatagtgtgg

SEQ ID NO: 1063094 - DNA, 33 bp, Homo sapien
ctgacacaaggtaccatctcagccatagtgtgg

SEQ ID NO: 1063095 - DNA, 33 bp, Homo sapien; identical to SEQ ID NO: 1063093

SEQ ID NO: 1063096 - DNA, 33 bp, Homo sapien; identical to SEQ ID NO: 1063094

SEQ ID NO: 1063097 - DNA, 33 bp, Homo sapien
ttgtggctccaaaagacgccttttcttttcaac

SEQ ID NO: 1063098 - DNA, 33 bp, Homo sapien
ttgtggctccaaaagatgccttttcttttcaac

SEQ ID NO: 1063099 - DNA, 33 bp, Homo sapien
aagaagatgcttttaacatttggtcacaagaaa

SEQ ID NO: 1063100 - DNA, 33 bp, Homo sapien
aagaagatgcttttaatatttggtcacaagaaa

SEQ ID NO: 1063101 - DNA, 33 bp, Homo sapien
cacaatggttagctaacgtaatcaccactgagg

SEQ ID NO: 1063102 - DNA, 33 bp, Homo sapien
cacaatggttagctaatgtaatcaccactgagg

SEQ ID NO: 1063103 - DNA, 33 bp, Homo sapien; identical to SEQ ID NO: 1063101

SEQ ID NO: 1063104 - DNA, 33 bp, Homo sapien; identical to SEQ ID NO: 1063102

SEQ ID NO: 1063105 - DNA, 33 bp, Homo sapien
gttaaatataaagctccactgatagaaaacttc

SEQ ID NO: 1063106 - DNA, 33 bp, Homo sapien
gttaaatataaagctctactgatagaaaacttc

SEQ ID NO: 1063107 - DNA, 33 bp, Homo sapien; identical to SEQ ID NO: 1063105

SEQ ID NO: 1063108 - DNA, 33 bp, Homo sapien; identical to SEQ ID NO: 1063106

SEQ ID NO: 1063109 - DNA, 33 bp, Homo sapien
tttttttacatgaagcccaatcactagaaagac

SEQ ID NO: 1063110 - DNA, 33 bp, Homo sapien
tttttttacatgaagctcaatcactagaaagac

SEQ ID NO: 1063111 - DNA, 33 bp, Homo sapien
ttttggctgtctaagccgctagcaaggccagaa

SEQ ID NO: 1063112 - DNA, 33 bp, Homo sapien
ttttggctgtctaagctgctagcaaggccagaa

SEQ ID NO: 1063113 - DNA, 33 bp, Homo sapien
attagggcatggatcccagtcaagcagtgccaa

SEQ ID NO: 1063114 - DNA, 33 bp, Homo sapien
attagggcatggatcctagtcaagcagtgccaa

SEQ ID NO: 1063115 - DNA, 33 bp, Homo sapien
tttcatttgatttttgcaacaatgctgtgaggt

SEQ ID NO: 1063116 - DNA, 33 bp, Homo sapien
tttcatttgatttttgtaacaatgctgtgaggt

SEQ ID NO: 1063117 - DNA, 33 bp, Homo sapien
aagttggtgagttcaactacgtccttagtgatt

SEQ ID NO: 1063118 - DNA, 33 bp, Homo sapien
aagttggtgagttcaattacgtccttagtgatt

SEQ ID NO: 1063119 - DNA, 33 bp, Homo sapien
ttgagactacactgtacctagtcaaaaacacta

SEQ ID NO: 1063120 - DNA, 33 bp, Homo sapien
ttgagactacactgtatctagtcaaaaacacta

SEQ ID NO: 1063121 - DNA, 33 bp, Homo sapien; identical to SEQ ID NO: 1063119

SEQ ID NO: 1063122 - DNA, 33 bp, Homo sapien; identical to SEQ ID NO: 1063120

SEQ ID NO: 1063123 - DNA, 33 bp, Homo sapien
tagcctcagcatactacaaggaaacttaaatgg

SEQ ID NO: 1063124 - DNA, 33 bp, Homo sapien
tagcctcagcatactagaaggaaacttaaatgg

SEQ ID NO: 1063125 - DNA, 33 bp, Homo sapien
gaggttaaatgaacaaattgaaggatgatatat

SEQ ID NO: 1063126 - DNA, 33 bp, Homo sapien
gaggttaaatgaacaagttgaaggatgatatat

SEQ ID NO: 1063127 - DNA, 33 bp, Homo sapien; identical to SEQ ID NO: 1063125

SEQ ID NO: 1063128 - DNA, 33 bp, Homo sapien; identical to SEQ ID NO: 1063126

SEQ ID NO: 1063129 - DNA, 33 bp, Homo sapien
aaacagttagtaaaatgagggcgcagtgaaaag

SEQ ID NO: 1063130 - DNA, 33 bp, Homo sapien
aaacagttagtaaaattagggcgcagtgaaaag

SEQ ID NO: 1063131 - DNA, 33 bp, Homo sapien; identical to SEQ ID NO: 1063129

SEQ ID NO: 1063132 - DNA, 33 bp, Homo sapien; identical to SEQ ID NO: 1063130

SEQ ID NO: 1063133 - DNA, 33 bp, Homo sapien
cttgggcgggtaatagccctgaacttccctgga

SEQ ID NO: 1063134 - DNA, 33 bp, Homo sapien
cttgggcgggtaatagtcctgaacttccctgga

SEQ ID NO: 1063135 - DNA, 33 bp, Homo sapien
tcctgcactgccagaactgcaaccactagtact

SEQ ID NO: 1063136 - DNA, 33 bp, Homo sapien
tcctgcactgccagaattgcaaccactagtact

SEQ ID NO: 1063137 - DNA, 33 bp, Homo sapien
gtatggttgattaatcaaaattgccaaatataa

SEQ ID NO: 1063138 - DNA, 33 bp, Homo sapien
gtatggttgattaatccaaattgccaaatataa

SEQ ID NO: 1063139 - DNA, 33 bp, Homo sapien
caaaataatcaacatcaatacccagttaatatg

SEQ ID NO: 1063140 - DNA, 33 bp, Homo sapien
caaaataatcaacatcgatacccagttaatatg

SEQ ID NO: 1063141 - DNA, 33 bp, Homo sapien; identical to SEQ ID NO: 1063139

SEQ ID NO: 1063142 - DNA, 33 bp, Homo sapien; identical to SEQ ID NO: 1063140

SEQ ID NO: 1063143 - DNA, 33 bp, Homo sapien
tctctccttctgaaagcatctcaattaaactaa

SEQ ID NO: 1063144 - DNA, 33 bp, Homo sapien
tctctccttctgaaagtatctcaattaaactaa

SEQ ID NO: 1063145 - DNA, 33 bp, Homo sapien
gccttttgtagaggacacatacaatgaataaaa

SEQ ID NO: 1063146 - DNA, 33 bp, Homo sapien
gccttttgtagaggacgcatacaatgaataaaa

SEQ ID NO: 1063147 - DNA, 33 bp, Homo sapien
ccctaagtaattccaaagtgcatttaaggttga

SEQ ID NO: 1063148 - DNA, 33 bp, Homo sapien
ccctaagtaattccaatgtgcatttaaggttga

SEQ ID NO: 1063149 - DNA, 33 bp, Homo sapien
ggatacagatcagaataagtaaagaggaaaggg

SEQ ID NO: 1063150 - DNA, 33 bp, Homo sapien
ggatacagatcagaatgagtaaagaggaaaggg

SEQ ID NO: 1063151 - DNA, 33 bp, Homo sapien
tttttctgtaacaaacaataacaataagaataa

SEQ ID NO: 1063152 - DNA, 33 bp, Homo sapien
tttttctgtaacaaacgataacaataagaataa

SEQ ID NO: 1063153 - DNA, 33 bp, Homo sapien
aaatgcttttggctacaaagatagattatattg

SEQ ID NO: 1063154 - DNA, 33 bp, Homo sapien
aaatgcttttggctacgaagatagattatattg

SEQ ID NO: 1063155 - DNA, 33 bp, Homo sapien
aattaggctttgtcaagattagaatactttgct

SEQ ID NO: 1063156 - DNA, 33 bp, Homo sapien
aattaggctttgtcaatattagaatactttgct

SEQ ID NO: 1063157 - DNA, 33 bp, Homo sapien
ctttgttttcaaaaaaatgtctttgcaaattgc

SEQ ID NO: 1063158 - DNA, 33 bp, Homo sapien
ctttgttttcaaaaaagtgtctttgcaaattgc

SEQ ID NO: 1063159 - DNA, 33 bp, Homo sapien; identical to SEQ ID NO: 1063157

SEQ ID NO: 1063160 - DNA, 33 bp, Homo sapien; identical to SEQ ID NO: 1063158

SEQ ID NO: 1063161 - DNA, 33 bp, Homo sapien
gggtggacagaggcagcagtgacatatgcccag

SEQ ID NO: 1063162 - DNA, 33 bp, Homo sapien
gggtggacagaggcaggagtgacatatgcccag

SEQ ID NO: 1063163 - DNA, 33 bp, Homo sapien
tgggctgagttgcagaactatctcaggatctgc

SEQ ID NO: 1063164 - DNA, 33 bp, Homo sapien
tgggctgagttgcagagctatctcaggatctgc

SEQ ID NO: 1063165 - DNA, 33 bp, Homo sapien
cacacaggtaccataaagacacactctgaattt

SEQ ID NO: 1063166 - DNA, 33 bp, Homo sapien
cacacaggtaccataaggacacactctgaattt

SEQ ID NO: 1063167 - DNA, 33 bp, Homo sapien
atgactatcttctaccacagtatccaattgaat

SEQ ID NO: 1063168 - DNA, 33 bp, Homo sapien
atgactatcttctaccgcagtatccaattgaat

SEQ ID NO: 1063169 - DNA, 33 bp, Homo sapien
gttatgtatatcctaccatttgcatcttaatat

SEQ ID NO: 1063170 - DNA, 33 bp, Homo sapien
gttatgtatatcctactatttgcatcttaatat

SEQ ID NO: 1063171 - DNA, 33 bp, Homo sapien
atatgaaagttggatacacttttaagaagaatt

SEQ ID NO: 1063172 - DNA, 33 bp, Homo sapien
atatgaaagttggatatacttttaagaagaatt

SEQ ID NO: 1063173 - DNA, 33 bp, Homo sapien
aaatttgaataacatcactaaaacaatgcatag

SEQ ID NO: 1063174 - DNA, 33 bp, Homo sapien
aaatttgaataacatcgctaaaacaatgcatag

SEQ ID NO: 1063175 - DNA, 33 bp, Homo sapien
gctgaggtttggggaactgacatggaagtgggt

SEQ ID NO: 1063176 - DNA, 33 bp, Homo sapien
gctgaggtttggggaattgacatggaagtgggt

SEQ ID NO: 1063177 - DNA, 33 bp, Homo sapien
agggatacataggccacgatactgttgccgcaa

SEQ ID NO: 1063178 - DNA, 33 bp, Homo sapien
agggatacataggccaggatactgttgccgcaa

SEQ ID NO: 1063179 - DNA, 33 bp, Homo sapien
ggactctgatactcccacaggttataccacacg

SEQ ID NO: 1063180 - DNA, 33 bp, Homo sapien
ggactctgatactcccgcaggttataccacacg

SEQ ID NO: 1063181 - DNA, 33 bp, Homo sapien
tttgatgagggctgcagatattgggatgatctg

SEQ ID NO: 1063182 - DNA, 33 bp, Homo sapien
tttgatgagggctgcatatattgggatgatctg

SEQ ID NO: 1063183 - DNA, 33 bp, Homo sapien
atgagattaagtaatacgtatactagctgagaa

SEQ ID NO: 1063184 - DNA, 33 bp, Homo sapien
atgagattaagtaatatgtatactagctgagaa

SEQ ID NO: 1063185 - DNA, 33 bp, Homo sapien
ataatggcttcttctgaaactacagaatctgag

SEQ ID NO: 1063186 - DNA, 33 bp, Homo sapien
ataatggcttcttctggaactacagaatctgag

SEQ ID NO: 1063187 - DNA, 33 bp, Homo sapien
gagaatgacagaacacagaacttatcaagacat

SEQ ID NO: 1063188 - DNA, 33 bp, Homo sapien
gagaatgacagaacacggaacttatcaagacat

SEQ ID NO: 1063189 - DNA, 33 bp, Homo sapien
gttattcattgcttgacgctattttataaattg

SEQ ID NO: 1063190 - DNA, 33 bp, Homo sapien
gttattcattgcttgatgctattttataaattg

SEQ ID NO: 1063191 - DNA, 33 bp, Homo sapien
tgtagcagggtcagatgaaagttctatagtgag

SEQ ID NO: 1063192 - DNA, 33 bp, Homo sapien
tgtagcagggtcagattaaagttctatagtgag

SEQ ID NO: 1063193 - DNA, 33 bp, Homo sapien
agttgatgtatatgtaccttaaagcccttactt

SEQ ID NO: 1063194 - DNA, 33 bp, Homo sapien
agttgatgtatatgtagcttaaagcccttactt

SEQ ID NO: 1063195 - DNA, 33 bp, Homo sapien
atgtgccatctgacacaaagtttgtaaatagct

SEQ ID NO: 1063196 - DNA, 33 bp, Homo sapien
atgtgccatctgacacgaagtttgtaaatagct

SEQ ID NO: 1063197 - DNA, 33 bp, Homo sapien
aatgtgtaactcaaccactttaagcctgaattt

SEQ ID NO: 1063198 - DNA, 33 bp, Homo sapien
aatgtgtaactcaaccgctttaagcctgaattt

SEQ ID NO: 1063199 - DNA, 33 bp, Homo sapien
cttgcaccctaggtagcagctcagccacagtag

SEQ ID NO: 1063200 - DNA, 33 bp, Homo sapien
cttgcaccctaggtagtagctcagccacagtag

SEQ ID NO: 1063201 - DNA, 33 bp, Homo sapien
catcacagcaactacacctaggagtatactggg

SEQ ID NO: 1063202 - DNA, 33 bp, Homo sapien
catcacagcaactacatctaggagtatactggg

SEQ ID NO: 1063203 - DNA, 33 bp, Homo sapien; identical to SEQ ID NO: 1063201

SEQ ID NO: 1063204 - DNA, 33 bp, Homo sapien; identical to SEQ ID NO: 1063202

SEQ ID NO: 1063205 - DNA, 33 bp, Homo sapien
gagatatggtagtctgcactggacaatatgaga

SEQ ID NO: 1063206 - DNA, 33 bp, Homo sapien
gagatatggtagtctgtactggacaatatgaga

SEQ ID NO: 1063207 - DNA, 33 bp, Homo sapien
tgacaggtagaactgacaatacatacaggtagc

SEQ ID NO: 1063208 - DNA, 33 bp, Homo sapien
tgacaggtagaactgataatacatacaggtagc

SEQ ID NO: 1063209 - DNA, 33 bp, Homo sapien
tgatcacggtactcaaatctttccaaatatctg

SEQ ID NO: 1063210 - DNA, 33 bp, Homo sapien
tgatcacggtactcaagtctttccaaatatctg

SEQ ID NO: 1063211 - DNA, 33 bp, Homo sapien; identical to SEQ ID NO: 1063209

SEQ ID NO: 1063212 - DNA, 33 bp, Homo sapien; identical to SEQ ID NO: 1063210

SEQ ID NO: 1063213 - DNA, 33 bp, Homo sapien
atactaatgacagtcaaataagtaaaccagtta

SEQ ID NO: 1063214 - DNA, 33 bp, Homo sapien
atactaatgacagtcacataagtaaaccagtta

SEQ ID NO: 1063215 - DNA, 33 bp, Homo sapien; identical to SEQ ID NO: 1063213

SEQ ID NO: 1063216 - DNA, 33 bp, Homo sapien; identical to SEQ ID NO: 1063214

SEQ ID NO: 1063217 - DNA, 33 bp, Homo sapien
gttataagttacctgacgcttttgcatcacatt

SEQ ID NO: 1063218 - DNA, 33 bp, Homo sapien
gttataagttacctgatgcttttgcatcacatt

SEQ ID NO: 1063219 - DNA, 33 bp, Homo sapien
aggaaaatttgttatacaatctgccccttattt

SEQ ID NO: 1063220 - DNA, 33 bp, Homo sapien
aggaaaatttgttatataatctgccccttattt

SEQ ID NO: 1063221 - DNA, 33 bp, Homo sapien
atcaaggcattcaccacagttttcacatttgct

SEQ ID NO: 1063222 - DNA, 33 bp, Homo sapien
atcaaggcattcaccagagttttcacatttgct

SEQ ID NO: 1063223 - DNA, 33 bp, Homo sapien
aatcctgaggccaataaatgaacatgaaaacac

SEQ ID NO: 1063224 - DNA, 33 bp, Homo sapien
aatcctgaggccaatacatgaacatgaaaacac

SEQ ID NO: 1063225 - DNA, 33 bp, Homo sapien
attcaattttatatcactcatctggtgcaggaa

SEQ ID NO: 1063226 - DNA, 33 bp, Homo sapien
attcaattttatatcattcatctggtgcaggaa

SEQ ID NO: 1063227 - DNA, 33 bp, Homo sapien
tttggtgcataccttgaacattgctttaacttt

SEQ ID NO: 1063228 - DNA, 33 bp, Homo sapien
tttggtgcataccttggacattgctttaacttt

SEQ ID NO: 1063229 - DNA, 33 bp, Homo sapien
catagttaaattgtcaacatggctttattgaca

SEQ ID NO: 1063230 - DNA, 33 bp, Homo sapien
catagttaaattgtcagcatggctttattgaca

SEQ ID NO: 1063231 - DNA, 33 bp, Homo sapien
tgaatctaatcgtgtaaactattgtggtcatgc

SEQ ID NO: 1063232 - DNA, 33 bp, Homo sapien
tgaatctaatcgtgtacactattgtggtcatgc

SEQ ID NO: 1063233 - DNA, 33 bp, Homo sapien
tataagacaaaaagtacattcatggttgccaag

SEQ ID NO: 1063234 - DNA, 33 bp, Homo sapien
tataagacaaaaagtatattcatggttgccaag

SEQ ID NO: 1063235 - DNA, 33 bp, Homo sapien
gtattcactttgtgtccgaagcttgtccagaca

SEQ ID NO: 1063236 - DNA, 33 bp, Homo sapien
gtattcactttgtgtctgaagcttgtccagaca

SEQ ID NO: 1063237 - DNA, 33 bp, Homo sapien
gatgcaaacattatccaatatgaggaatagtat

SEQ ID NO: 1063238 - DNA, 33 bp, Homo sapien
gatgcaaacattatccgatatgaggaatagtat

SEQ ID NO: 1063239 - DNA, 33 bp, Homo sapien
cagtagtggtggccaaactattaattgtctcat

SEQ ID NO: 1063240 - DNA, 33 bp, Homo sapien
cagtagtggtggccaagctattaattgtctcat

SEQ ID NO: 1063241 - DNA, 33 bp, Homo sapien
gtgcaaacctgtttggaatgagagttgtcaaga

SEQ ID NO: 1063242 - DNA, 33 bp, Homo sapien
gtgcaaacctgtttgggatgagagttgtcaaga

SEQ ID NO: 1063243 - DNA, 33 bp, Homo sapien
ttccactctggctaaacgaggaatgttacatat

SEQ ID NO: 1063244 - DNA, 33 bp, Homo sapien
ttccactctggctaaatgaggaatgttacatat

SEQ ID NO: 1063245 - DNA, 33 bp, Homo sapien
tgtactgagaattgcaagaaagataagaaagaa

SEQ ID NO: 1063246 - DNA, 33 bp, Homo sapien
tgtactgagaattgcatgaaagataagaaagaa

SEQ ID NO: 1063247 - DNA, 33 bp, Homo sapien
tttcaaagcatgacataataatattcctttgaa

SEQ ID NO: 1063248 - DNA, 33 bp, Homo sapien
tttcaaagcatgacatgataatattcctttgaa

SEQ ID NO: 1063249 - DNA, 33 bp, Homo sapien
catagtattaatttccccagatacattttgaaa

SEQ ID NO: 1063250 - DNA, 33 bp, Homo sapien
catagtattaatttcctcagatacattttgaaa

SEQ ID NO: 1063251 - DNA, 33 bp, Homo sapien
tacagtttgtcatcaaattaagtatggtcaata

SEQ ID NO: 1063252 - DNA, 33 bp, Homo sapien
tacagtttgtcatcaagttaagtatggtcaata

SEQ ID NO: 1063253 - DNA, 33 bp, Homo sapien
taccaccatttcatccgaaaggaatttccaaac

SEQ ID NO: 1063254 - DNA, 33 bp, Homo sapien
taccaccatttcatcctaaaggaatttccaaac

SEQ ID NO: 1063255 - DNA, 33 bp, Homo sapien
tgaaggcaaataggtacatagctacatagtaac

SEQ ID NO: 1063256 - DNA, 33 bp, Homo sapien
tgaaggcaaataggtatatagctacatagtaac

SEQ ID NO: 1063257 - DNA, 33 bp, Homo sapien
ttcgaaccattcacaaactagaacctggatatt

SEQ ID NO: 1063258 - DNA, 33 bp, Homo sapien
ttcgaaccattcacaatctagaacctggatatt

SEQ ID NO: 1063259 - DNA, 33 bp, Homo sapien
agctcaaagtacctagacaatgctggaccaaaa

SEQ ID NO: 1063260 - DNA, 33 bp, Homo sapien
agctcaaagtacctaggcaatgctggaccaaaa

SEQ ID NO: 1063261 - DNA, 33 bp, Homo sapien
ggctaccaactgatcagatcatgtacataaaag

SEQ ID NO: 1063262 - DNA, 33 bp, Homo sapien
ggctaccaactgatcatatcatgtacataaaag

SEQ ID NO: 1063263 - DNA, 33 bp, Homo sapien
cccaataacatggacaagtagcatttatagaca

SEQ ID NO: 1063264 - DNA, 33 bp, Homo sapien
cccaataacatggacaggtagcatttatagaca

SEQ ID NO: 1063265 - DNA, 33 bp, Homo sapien
tcactcctggcctaataaaaatatcttaacaga

SEQ ID NO: 1063266 - DNA, 33 bp, Homo sapien
tcactcctggcctaattaaaatatcttaacaga

SEQ ID NO: 1063267 - DNA, 33 bp, Homo sapien
tttcagcatccttaaaaaagataaattgcaacc

SEQ ID NO: 1063268 - DNA, 33 bp, Homo sapien
tttcagcatccttaaagaagataaattgcaacc

SEQ ID NO: 1063269 - DNA, 33 bp, Homo sapien
gaaatcatgttttaaaaaggctgtcattcacac

SEQ ID NO: 1063270 - DNA, 33 bp, Homo sapien
gaaatcatgttttaaacaggctgtcattcacac

SEQ ID NO: 1063271 - DNA, 33 bp, Homo sapien
aacaaaatactattcaacaagttcttcataggc

SEQ ID NO: 1063272 - DNA, 33 bp, Homo sapien
aacaaaatactattcagcaagttcttcataggc

SEQ ID NO: 1063273 - DNA, 33 bp, Homo sapien
taaatgtgtagcaaaaaatgtgtatacttctca

SEQ ID NO: 1063274 - DNA, 33 bp, Homo sapien
taaatgtgtagcaaaatatgtgtatacttctca

SEQ ID NO: 1063275 - DNA, 33 bp, Homo sapien
cacccaaaagccagagaaaaatttgaaacacct

SEQ ID NO: 1063276 - DNA, 33 bp, Homo sapien
cacccaaaagccagagtaaaatttgaaacacct

SEQ ID NO: 1063277 - DNA, 33 bp, Homo sapien
actaagaaattgacacaggaacattactattag

SEQ ID NO: 1063278 - DNA, 33 bp, Homo sapien
actaagaaattgacactggaacattactattag

SEQ ID NO: 1063279 - DNA, 33 bp, Homo sapien
tagttttctgctataagaggtctgcactaagtt

SEQ ID NO: 1063280 - DNA, 33 bp, Homo sapien
tagttttctgctataataggtctgcactaagtt

SEQ ID NO: 1063281 - DNA, 33 bp, Homo sapien
catggatgtgaagggccagcatattattatacc

SEQ ID NO: 1063282 - DNA, 33 bp, Homo sapien
catggatgtgaagggctagcatattattatacc

SEQ ID NO: 1063283 - DNA, 33 bp, Homo sapien
ctggctagccacgtgcagaggaattaaagtgga

SEQ ID NO: 1063284 - DNA, 33 bp, Homo sapien
ctggctagccacgtgccgaggaattaaagtgga

SEQ ID NO: 1063285 - DNA, 33 bp, Homo sapien
acatgcacttgtatataactcacagcactattc

SEQ ID NO: 1063286 - DNA, 33 bp, Homo sapien
acatgcacttgtatattactcacagcactattc

SEQ ID NO: 1063287 - DNA, 33 bp, Homo sapien
gcacagagtcaaatgaaacaagagaaaaatgcc

SEQ ID NO: 1063288 - DNA, 33 bp, Homo sapien
gcacagagtcaaatgacacaagagaaaaatgcc

SEQ ID NO: 1063289 - DNA, 33 bp, Homo sapien
ttggtagccgaacacaaaacatagaaactcttg

SEQ ID NO: 1063290 - DNA, 33 bp, Homo sapien
ttggtagccgaacacacaacatagaaactcttg

SEQ ID NO: 1063291 - DNA, 33 bp, Homo sapien
atgacacagtctcatccagtattgcaatcccca

SEQ ID NO: 1063292 - DNA, 33 bp, Homo sapien
atgacacagtctcatcgagtattgcaatcccca

SEQ ID NO: 1063293 - DNA, 33 bp, Homo sapien
gtttaatattttgaaccattctaatatttgctg

SEQ ID NO: 1063294 - DNA, 33 bp, Homo sapien
gtttaatattttgaacgattctaatatttgctg

SEQ ID NO: 1063295 - DNA, 33 bp, Homo sapien
gctaatattcagtatcactttgttacttgaaaa

SEQ ID NO: 1063296 - DNA, 33 bp, Homo sapien
gctaatattcagtatctctttgttacttgaaaa

SEQ ID NO: 1063297 - DNA, 33 bp, Homo sapien; identical to SEQ ID NO: 1063295

SEQ ID NO: 1063298 - DNA, 33 bp, Homo sapien; identical to SEQ ID NO: 1063296

SEQ ID NO: 1063299 - DNA, 33 bp, Homo sapien
aaaattggagttcagacaaaattactactcctg

SEQ ID NO: 1063300 - DNA, 33 bp, Homo sapien
aaaattggagttcagataaaattactactcctg

SEQ ID NO: 1063301 - DNA, 33 bp, Homo sapien
gagctatggagttagacggtcttgttttataat

SEQ ID NO: 1063302 - DNA, 33 bp, Homo sapien
gagctatggagttagatggtcttgttttataat

SEQ ID NO: 1063303 - DNA, 33 bp, Homo sapien
ttaagtacttatagaaatgtgaggcttatcact

SEQ ID NO: 1063304 - DNA, 33 bp, Homo sapien
ttaagtacttatagaagtgtgaggcttatcact

SEQ ID NO: 1063305 - DNA, 33 bp, Homo sapien
gaagagacagtgcagcacaataacagagtactc

SEQ ID NO: 1063306 - DNA, 33 bp, Homo sapien
gaagagacagtgcagcgcaataacagagtactc

SEQ ID NO: 1063307 - DNA, 33 bp, Homo sapien
ttagtactaactctacccaaaatcagaaatgat

SEQ ID NO: 1063308 - DNA, 33 bp, Homo sapien
ttagtactaactctactcaaaatcagaaatgat

SEQ ID NO: 1063309 - DNA, 33 bp, Homo sapien
gtatattttctacaacaactccaaaattgaagg

SEQ ID NO: 1063310 - DNA, 33 bp, Homo sapien
gtatattttctacaacgactccaaaattgaagg

SEQ ID NO: 1063311 - DNA, 33 bp, Homo sapien
tatatacgcacctaacactggaattttcaaatt

SEQ ID NO: 1063312 - DNA, 33 bp, Homo sapien
tatatacgcacctaacgctggaattttcaaatt

SEQ ID NO: 1063313 - DNA, 33 bp, Homo sapien
ttgtgtgtgcagttttaaaaaaatttttatgag

SEQ ID NO: 1063314 - DNA, 33 bp, Homo sapien
ttgtgtgtgcagtttttaaaaaatttttatgag

SEQ ID NO: 1063315 - DNA, 33 bp, Homo sapien
gtatatattttttacactgatgtccacaaaata

SEQ ID NO: 1063316 - DNA, 33 bp, Homo sapien
gtatatattttttacattgatgtccacaaaata

SEQ ID NO: 1063317 - DNA, 33 bp, Homo sapien; identical to SEQ ID NO: 1063315

SEQ ID NO: 1063318 - DNA, 33 bp, Homo sapien; identical to SEQ ID NO: 1063316

SEQ ID NO: 1063319 - DNA, 33 bp, Homo sapien
gggtaattcaggataaaatacttactgcaatat

SEQ ID NO: 1063320 - DNA, 33 bp, Homo sapien
gggtaattcaggataatatacttactgcaatat

SEQ ID NO: 1063321 - DNA, 33 bp, Homo sapien
gttctgagaccttgaacacatcatctaaatgct

SEQ ID NO: 1063322 - DNA, 33 bp, Homo sapien
gttctgagaccttgaatacatcatctaaatgct

SEQ ID NO: 1063323 - DNA, 33 bp, Homo sapien
tgtttacttggaagtacatttgatggcttaatt

SEQ ID NO: 1063324 - DNA, 33 bp, Homo sapien
tgtttacttggaagtagatttgatggcttaatt

SEQ ID NO: 1063325 - DNA, 33 bp, Homo sapien; identical to SEQ ID NO: 1063323

SEQ ID NO: 1063326 - DNA, 33 bp, Homo sapien; identical to SEQ ID NO: 1063324

SEQ ID NO: 1063327 - DNA, 33 bp, Homo sapien
tgttccaagaaatagacggtaccttccaaagat

SEQ ID NO: 1063328 - DNA, 33 bp, Homo sapien
tgttccaagaaatagatggtaccttccaaagat

SEQ ID NO: 1063329 - DNA, 33 bp, Homo sapien
caaataaggaaaataaagagcagcggaagaacc

SEQ ID NO: 1063330 - DNA, 33 bp, Homo sapien
caaataaggaaaataaggagcagcggaagaacc

SEQ ID NO: 1063331 - DNA, 33 bp, Homo sapien
tgaggcatttatataaactcttggcacacttca

SEQ ID NO: 1063332 - DNA, 33 bp, Homo sapien
tgaggcatttatataagctcttggcacacttca

SEQ ID NO: 1063333 - DNA, 33 bp, Homo sapien; identical to SEQ ID NO: 1063331

SEQ ID NO: 1063334 - DNA, 33 bp, Homo sapien; identical to SEQ ID NO: 1063332

SEQ ID NO: 1063335 - DNA, 33 bp, Homo sapien
aaacattggcctctcactacattgcactaggaa

SEQ ID NO: 1063336 - DNA, 33 bp, Homo sapien
aaacattggcctctcattacattgcactaggaa

SEQ ID NO: 1063337 - DNA, 33 bp, Homo sapien
aataaacagcaaaaagccacagttgcttatgat

SEQ ID NO: 1063338 - DNA, 33 bp, Homo sapien
aataaacagcaaaaagtcacagttgcttatgat

SEQ ID NO: 1063339 - DNA, 33 bp, Homo sapien
tctcaatataatgctacgaatgattatccattg

SEQ ID NO: 1063340 - DNA, 33 bp, Homo sapien
tctcaatataatgctatgaatgattatccattg

SEQ ID NO: 1063341 - DNA, 33 bp, Homo sapien
tagatccagaagataaataacaattattagagt

SEQ ID NO: 1063342 - DNA, 33 bp, Homo sapien
tagatccagaagataagtaacaattattagagt

SEQ ID NO: 1063343 - DNA, 33 bp, Homo sapien
gccgatgtacaagatccacctttcttttccctg

SEQ ID NO: 1063344 - DNA, 33 bp, Homo sapien
gccgatgtacaagatctacctttcttttccctg

SEQ ID NO: 1063345 - DNA, 33 bp, Homo sapien
agttgctctcgttcacgctgcttcattctgcta

SEQ ID NO: 1063346 - DNA, 33 bp, Homo sapien
agttgctctcgttcactctgcttcattctgcta

SEQ ID NO: 1063347 - DNA, 33 bp, Homo sapien
acttgggagattagggaagctttacttttcaaa

SEQ ID NO: 1063348 - DNA, 33 bp, Homo sapien
acttgggagattaggggagctttacttttcaaa

SEQ ID NO: 1063349 - DNA, 33 bp, Homo sapien
tgtaactcaaactgtcaaataatgaactagata

SEQ ID NO: 1063350 - DNA, 33 bp, Homo sapien
tgtaactcaaactgtcgaataatgaactagata

SEQ ID NO: 1063351 - DNA, 33 bp, Homo sapien
tctagctcttgagagagaatttattttatgttg

SEQ ID NO: 1063352 - DNA, 33 bp, Homo sapien
tctagctcttgagagataatttattttatgttg

SEQ ID NO: 1063353 - DNA, 33 bp, Homo sapien
cagtgactctcaaaataatgaaaactgaagaat

SEQ ID NO: 1063354 - DNA, 33 bp, Homo sapien
cagtgactctcaaaatcatgaaaactgaagaat

SEQ ID NO: 1063355 - DNA, 33 bp, Homo sapien
tgaaatagtctctgaactagatttgaaacaaaa

SEQ ID NO: 1063356 - DNA, 33 bp, Homo sapien
tgaaatagtctctgaattagatttgaaacaaaa

SEQ ID NO: 1063357 - DNA, 33 bp, Homo sapien
cgacatgagatttgccagatggtttggtaccgg

SEQ ID NO: 1063358 - DNA, 33 bp, Homo sapien
cgacatgagatttgccggatggtttggtaccgg

SEQ ID NO: 1063359 - DNA, 33 bp, Homo sapien
ttatatttctttctcaaatgcagtaggttttcc

SEQ ID NO: 1063360 - DNA, 33 bp, Homo sapien
ttatatttctttctcagatgcagtaggttttcc

SEQ ID NO: 1063361 - DNA, 33 bp, Homo sapien
agaatgattttcttaccattaggtttgagttgc

SEQ ID NO: 1063362 - DNA, 33 bp, Homo sapien
agaatgattttcttactattaggtttgagttgc

SEQ ID NO: 1063363 - DNA, 33 bp, Homo sapien
caactttgcctcggacaagaaccaatctgcacc

SEQ ID NO: 1063364 - DNA, 33 bp, Homo sapien
caactttgcctcggaccagaaccaatctgcacc

SEQ ID NO: 1063365 - DNA, 33 bp, Homo sapien
catgctgatcaaataaactgatatacaaacttg

SEQ ID NO: 1063366 - DNA, 33 bp, Homo sapien
catgctgatcaaataagctgatatacaaacttg

SEQ ID NO: 1063367 - DNA, 33 bp, Homo sapien
tttaaatagggcaatcagacatttttacctgtg

SEQ ID NO: 1063368 - DNA, 33 bp, Homo sapien
tttaaatagggcaatccgacatttttacctgtg

SEQ ID NO: 1063369 - DNA, 33 bp, Homo sapien
ctacaatggatgctaacatgaaattgcagcagg

SEQ ID NO: 1063370 - DNA, 33 bp, Homo sapien
ctacaatggatgctaatatgaaattgcagcagg

SEQ ID NO: 1063371 - DNA, 33 bp, Homo sapien
gaacaacgggtgacggaaaaacttgaagctagg

SEQ ID NO: 1063372 - DNA, 33 bp, Homo sapien
gaacaacgggtgacggcaaaacttgaagctagg

SEQ ID NO: 1063373 - DNA, 33 bp, Homo sapien
cagttggttcccttaacgtatgaactaatgtct

SEQ ID NO: 1063374 - DNA, 33 bp, Homo sapien
cagttggttcccttaatgtatgaactaatgtct

SEQ ID NO: 1063375 - DNA, 33 bp, Homo sapien
gcattatttgagttgacagtattgagacaggtt

SEQ ID NO: 1063376 - DNA, 33 bp, Homo sapien
gcattatttgagttgatagtattgagacaggtt

SEQ ID NO: 1063377 - DNA, 33 bp, Homo sapien
tgagaataaggtgcaactgtactctaattcaac

SEQ ID NO: 1063378 - DNA, 33 bp, Homo sapien
tgagaataaggtgcaattgtactctaattcaac

SEQ ID NO: 1063379 - DNA, 33 bp, Homo sapien
ttactctgttccaagcactctatgtttgtgcat

SEQ ID NO: 1063380 - DNA, 33 bp, Homo sapien
ttactctgttccaagcgctctatgtttgtgcat

SEQ ID NO: 1063381 - DNA, 33 bp, Homo sapien
ggtaacaggtgaggataaaatttggacttgact

SEQ ID NO: 1063382 - DNA, 33 bp, Homo sapien
ggtaacaggtgaggatgaaatttggacttgact

SEQ ID NO: 1063383 - DNA, 33 bp, Homo sapien
gtacttaaaatggaaaagttaaatgtgatttta

SEQ ID NO: 1063384 - DNA, 33 bp, Homo sapien
gtacttaaaatggaaaggttaaatgtgatttta

SEQ ID NO: 1063385 - DNA, 33 bp, Homo sapien
ggagggtcaggaccaacaaactacctgtcaggt

SEQ ID NO: 1063386 - DNA, 33 bp, Homo sapien
ggagggtcaggaccaataaactacctgtcaggt

SEQ ID NO: 1063387 - DNA, 33 bp, Homo sapien
tttctaattcattgtacgaggccatgatttcct

SEQ ID NO: 1063388 - DNA, 33 bp, Homo sapien
tttctaattcattgtatgaggccatgatttcct

SEQ ID NO: 1063389 - DNA, 33 bp, Homo sapien
ttacaattgggacctacacatgaaaggggcttt

SEQ ID NO: 1063390 - DNA, 33 bp, Homo sapien
ttacaattgggacctatacatgaaaggggcttt

SEQ ID NO: 1063391 - DNA, 33 bp, Homo sapien
gtcagattgttccctccattgacgtggaagaaa

SEQ ID NO: 1063392 - DNA, 33 bp, Homo sapien
gtcagattgttccctctattgacgtggaagaaa

SEQ ID NO: 1063393 - DNA, 33 bp, Homo sapien
ctatcttcttgttacccgaaggcatttgaagaa

SEQ ID NO: 1063394 - DNA, 33 bp, Homo sapien
ctatcttcttgttacctgaaggcatttgaagaa

SEQ ID NO: 1063395 - DNA, 33 bp, Homo sapien; identical to SEQ ID NO: 1063393

SEQ ID NO: 1063396 - DNA, 33 bp, Homo sapien; identical to SEQ ID NO: 1063394

SEQ ID NO: 1063397 - DNA, 33 bp, Homo sapien
ttcctataacaactaaactgctcctgttatttc

SEQ ID NO: 1063398 - DNA, 33 bp, Homo sapien
ttcctataacaactaacctgctcctgttatttc

SEQ ID NO: 1063399 - DNA, 33 bp, Homo sapien
aagactatactacaacaaggtcattaatttcta

SEQ ID NO: 1063400 - DNA, 33 bp, Homo sapien
aagactatactacaacgaggtcattaatttcta

SEQ ID NO: 1063401 - DNA, 33 bp, Homo sapien; identical to SEQ ID NO: 1063399

SEQ ID NO: 1063402 - DNA, 33 bp, Homo sapien; identical to SEQ ID NO: 1063400

SEQ ID NO: 1063403 - DNA, 33 bp, Homo sapien
tataaggaacaaataaggtatgggacactgatc

SEQ ID NO: 1063404 - DNA, 33 bp, Homo sapien
tataaggaacaaataatgtatgggacactgatc

SEQ ID NO: 1063405 - DNA, 33 bp, Homo sapien
aatctattgactggaacagtgactttatgggat

SEQ ID NO: 1063406 - DNA, 33 bp, Homo sapien
aatctattgactggaatagtgactttatgggat

SEQ ID NO: 1063407 - DNA, 33 bp, Homo sapien; identical to SEQ ID NO: 1063405

SEQ ID NO: 1063408 - DNA, 33 bp, Homo sapien; identical to SEQ ID NO: 1063406

SEQ ID NO: 1063409 - DNA, 33 bp, Homo sapien
atattcagactttcaaatagcctgagaccacat

SEQ ID NO: 1063410 - DNA, 33 bp, Homo sapien
atattcagactttcaagtagcctgagaccacat

SEQ ID NO: 1063411 - DNA, 33 bp, Homo sapien
gatgcagaatgaaagtaaacttgttctaaagca

SEQ ID NO: 1063412 - DNA, 33 bp, Homo sapien
gatgcagaatgaaagtcaacttgttctaaagca

SEQ ID NO: 1063413 - DNA, 33 bp, Homo sapien
gaccaatatagcaaaaatttagtgtcatatgag

SEQ ID NO: 1063414 - DNA, 33 bp, Homo sapien
gaccaatatagcaaaagtttagtgtcatatgag

SEQ ID NO: 1063415 - DNA, 33 bp, Homo sapien
aagttatactataccaagtgtaccatgtacagc

SEQ ID NO: 1063416 - DNA, 33 bp, Homo sapien
aagttatactataccaggtgtaccatgtacagc

SEQ ID NO: 1063417 - DNA, 33 bp, Homo sapien
ttattactggtactaagagcaataatggcaata

SEQ ID NO: 1063418 - DNA, 33 bp, Homo sapien
ttattactggtactaatagcaataatggcaata

SEQ ID NO: 1063419 - DNA, 33 bp, Homo sapien
aaaagagttttgcctggaatatcaaagacacag

SEQ ID NO: 1063420 - DNA, 33 bp, Homo sapien
aaaagagttttgcctgtaatatcaaagacacag

SEQ ID NO: 1063421 - DNA, 33 bp, Homo sapien
tgacaggtaatagtaacgcattcaggtttgttg

SEQ ID NO: 1063422 - DNA, 33 bp, Homo sapien
tgacaggtaatagtaatgcattcaggtttgttg

SEQ ID NO: 1063423 - DNA, 33 bp, Homo sapien
gcatattaagatgaacggtcacaaaattttaca

SEQ ID NO: 1063424 - DNA, 33 bp, Homo sapien
gcatattaagatgaactgtcacaaaattttaca

SEQ ID NO: 1063425 - DNA, 33 bp, Homo sapien
tggagataatgctagacaaaattcagaacaaaa

SEQ ID NO: 1063426 - DNA, 33 bp, Homo sapien
tggagataatgctagataaaattcagaacaaaa

SEQ ID NO: 1063427 - DNA, 33 bp, Homo sapien
gaacacaaatgaactacctttcataactatcaa

SEQ ID NO: 1063428 - DNA, 33 bp, Homo sapien
gaacacaaatgaactatctttcataactatcaa

SEQ ID NO: 1063429 - DNA, 33 bp, Homo sapien; identical to SEQ ID NO: 1063427

SEQ ID NO: 1063430 - DNA, 33 bp, Homo sapien; identical to SEQ ID NO: 1063428

SEQ ID NO: 1063431 - DNA, 33 bp, Homo sapien
gggcccaatatgacgacctggctgggaagaacc

SEQ ID NO: 1063432 - DNA, 33 bp, Homo sapien
gggcccaatatgacgagctggctgggaagaacc

SEQ ID NO: 1063433 - DNA, 33 bp, Homo sapien
taggcagtatcattccagatacaggcgctggca

SEQ ID NO: 1063434 - DNA, 33 bp, Homo sapien
taggcagtatcattccggatacaggcgctggca

SEQ ID NO: 1063435 - DNA, 33 bp, Homo sapien
ttatgaaaattgggtgcaaattcttcataagtg

SEQ ID NO: 1063436 - DNA, 33 bp, Homo sapien
ttatgaaaattgggtgtaaattcttcataagtg

SEQ ID NO: 1063437 - DNA, 33 bp, Homo sapien; identical to SEQ ID NO: 1063435

SEQ ID NO: 1063438 - DNA, 33 bp, Homo sapien; identical to SEQ ID NO: 1063436

SEQ ID NO: 1063439 - DNA, 33 bp, Homo sapien
gagcatcgattagtaaactacaggtgtatcatt

SEQ ID NO: 1063440 - DNA, 33 bp, Homo sapien
gagcatcgattagtaagctacaggtgtatcatt

SEQ ID NO: 1063441 - DNA, 33 bp, Homo sapien; identical to SEQ ID NO: 1063439

SEQ ID NO: 1063442 - DNA, 33 bp, Homo sapien; identical to SEQ ID NO: 1063440

SEQ ID NO: 1063443 - DNA, 33 bp, Homo sapien
agtcccaaagtcaaagaatatacatctctgaaa

SEQ ID NO: 1063444 - DNA, 33 bp, Homo sapien
agtcccaaagtcaaaggatatacatctctgaaa

SEQ ID NO: 1063445 - DNA, 33 bp, Homo sapien
ctcatagcaatttcccagggaaacaagacatct

SEQ ID NO: 1063446 - DNA, 33 bp, Homo sapien
ctcatagcaatttccctgggaaacaagacatct

SEQ ID NO: 1063447 - DNA, 33 bp, Homo sapien
taaataatcaggataaacagattcttgagttac

SEQ ID NO: 1063448 - DNA, 33 bp, Homo sapien
taaataatcaggataaccagattcttgagttac

SEQ ID NO: 1063449 - DNA, 33 bp, Homo sapien
agaacataaaatggcacagctgctttggaaaac

SEQ ID NO: 1063450 - DNA, 33 bp, Homo sapien
agaacataaaatggcatagctgctttggaaaac

SEQ ID NO: 1063451 - DNA, 33 bp, Homo sapien
taaaagacgtagagtagaatttggacatctgga

SEQ ID NO: 1063452 - DNA, 33 bp, Homo sapien
taaaagacgtagagtataatttggacatctgga

SEQ ID NO: 1063453 - DNA, 33 bp, Homo sapien
catctcaagggaatggaaagtcacagaatggca

SEQ ID NO: 1063454 - DNA, 33 bp, Homo sapien
catctcaagggaatggcaagtcacagaatggca

SEQ ID NO: 1063455 - DNA, 33 bp, Homo sapien; identical to SEQ ID NO: 1063453

SEQ ID NO: 1063456 - DNA, 33 bp, Homo sapien; identical to SEQ ID NO: 1063454

SEQ ID NO: 1063457 - DNA, 33 bp, Homo sapien
aagattcccatcacaacttaggactcaaggctg

SEQ ID NO: 1063458 - DNA, 33 bp, Homo sapien
aagattcccatcacaatttaggactcaaggctg

SEQ ID NO: 1063459 - DNA, 33 bp, Homo sapien
aacacagtaggattgacgtttaccgaaataggc

SEQ ID NO: 1063460 - DNA, 33 bp, Homo sapien
aacacagtaggattgatgtttaccgaaataggc

SEQ ID NO: 1063461 - DNA, 33 bp, Homo sapien; identical to SEQ ID NO: 1063459

SEQ ID NO: 1063462 - DNA, 33 bp, Homo sapien; identical to SEQ ID NO: 1063460

SEQ ID NO: 1063463 - DNA, 33 bp, Homo sapien
aagacatacataagacagggcaatttacataag

SEQ ID NO: 1063464 - DNA, 33 bp, Homo sapien
aagacatacataagactgggcaatttacataag

SEQ ID NO: 1063465 - DNA, 33 bp, Homo sapien
ctatactcaaacaatccaaaggaagtcatcaaa

SEQ ID NO: 1063466 - DNA, 33 bp, Homo sapien
ctatactcaaacaatctaaaggaagtcatcaaa

SEQ ID NO: 1063467 - DNA, 33 bp, Homo sapien
gctgaaatttcgacaaggaggcccgactcagtg

SEQ ID NO: 1063468 - DNA, 33 bp, Homo sapien
gctgaaatttcgacaatgaggcccgactcagtg

SEQ ID NO: 1063469 - DNA, 33 bp, Homo sapien
taattccattcatgaggcaaagctttaatgacc

SEQ ID NO: 1063470 - DNA, 33 bp, Homo sapien
taattccattcatgagtcaaagctttaatgacc

SEQ ID NO: 1063471 - DNA, 33 bp, Homo sapien
cattccctttgctccaaaaccttgtcagcatct

SEQ ID NO: 1063472 - DNA, 33 bp, Homo sapien
cattccctttgctccacaaccttgtcagcatct

SEQ ID NO: 1063473 - DNA, 33 bp, Homo sapien
gctagcttccaaatataatacattgttccagtt

SEQ ID NO: 1063474 - DNA, 33 bp, Homo sapien
gctagcttccaaatatgatacattgttccagtt

SEQ ID NO: 1063475 - DNA, 33 bp, Homo sapien
ccttcaaatgaaatacaacttgcttgcattctg

SEQ ID NO: 1063476 - DNA, 33 bp, Homo sapien
ccttcaaatgaaatactacttgcttgcattctg

SEQ ID NO: 1063477 - DNA, 33 bp, Homo sapien; identical to SEQ ID NO: 1063475

SEQ ID NO: 1063478 - DNA, 33 bp, Homo sapien; identical to SEQ ID NO: 1063476

SEQ ID NO: 1063479 - DNA, 33 bp, Homo sapien
taacacttacaatgaaccttactctgccaagtc

SEQ ID NO: 1063480 - DNA, 33 bp, Homo sapien
taacacttacaatgaatcttactctgccaagtc

SEQ ID NO: 1063481 - DNA, 33 bp, Homo sapien
ccttcccaagagggacagcacaaacaagcacat

SEQ ID NO: 1063482 - DNA, 33 bp, Homo sapien
ccttcccaagagggacggcacaaacaagcacat

SEQ ID NO: 1063483 - DNA, 33 bp, Homo sapien
gagagaaatccccacacattttgtcacagaagt

SEQ ID NO: 1063484 - DNA, 33 bp, Homo sapien
gagagaaatccccacatattttgtcacagaagt

SEQ ID NO: 1063485 - DNA, 33 bp, Homo sapien
aagagagtaattcatgcatatggttgggggaac

SEQ ID NO: 1063486 - DNA, 33 bp, Homo sapien
aagagagtaattcatgtatatggttgggggaac

SEQ ID NO: 1063487 - DNA, 33 bp, Homo sapien; identical to SEQ ID NO: 1063485

SEQ ID NO: 1063488 - DNA, 33 bp, Homo sapien; identical to SEQ ID NO: 1063486

SEQ ID NO: 1063489 - DNA, 33 bp, Homo sapien; identical to SEQ ID NO: 1063485

SEQ ID NO: 1063490 - DNA, 33 bp, Homo sapien; identical to SEQ ID NO: 1063486

SEQ ID NO: 1063491 - DNA, 33 bp, Homo sapien
agattgcctaggtaaacttctgtagttcaaatc

SEQ ID NO: 1063492 - DNA, 33 bp, Homo sapien
agattgcctaggtaaagttctgtagttcaaatc

SEQ ID NO: 1063493 - DNA, 33 bp, Homo sapien
attttaaacaccatgcagagagaaatttaaaag

SEQ ID NO: 1063494 - DNA, 33 bp, Homo sapien
attttaaacaccatgcggagagaaatttaaaag

SEQ ID NO: 1063495 - DNA, 33 bp, Homo sapien
aaggatgacatataagaaaaagatgtacaagac

SEQ ID NO: 1063496 - DNA, 33 bp, Homo sapien
aaggatgacatataaggaaaagatgtacaagac

SEQ ID NO: 1063497 - DNA, 33 bp, Homo sapien
aatccaggaaacaagaaatcctacctaaacagt

SEQ ID NO: 1063498 - DNA, 33 bp, Homo sapien
aatccaggaaacaagagatcctacctaaacagt

SEQ ID NO: 1063499 - DNA, 33 bp, Homo sapien
agcagaaaggaaaaccagaccaaagtcagctga

SEQ ID NO: 1063500 - DNA, 33 bp, Homo sapien
agcagaaaggaaaaccggaccaaagtcagctga

SEQ ID NO: 1063501 - DNA, 33 bp, Homo sapien
taaatctgatacttcaactcttgaaccaaaaat

SEQ ID NO: 1063502 - DNA, 33 bp, Homo sapien
taaatctgatacttcacctcttgaaccaaaaat

SEQ ID NO: 1063503 - DNA, 33 bp, Homo sapien; identical to SEQ ID NO: 1063501

SEQ ID NO: 1063504 - DNA, 33 bp, Homo sapien; identical to SEQ ID NO: 1063502

SEQ ID NO: 1063505 - DNA, 33 bp, Homo sapien
ttattcattatcaagaaaacagtacatgaaaga

SEQ ID NO: 1063506 - DNA, 33 bp, Homo sapien
ttattcattatcaagagaacagtacatgaaaga

SEQ ID NO: 1063507 - DNA, 33 bp, Homo sapien; identical to SEQ ID NO: 1063505

SEQ ID NO: 1063508 - DNA, 33 bp, Homo sapien; identical to SEQ ID NO: 1063506

SEQ ID NO: 1063509 - DNA, 33 bp, Homo sapien
ctacatctcagcttcaacactttgcaacctata

SEQ ID NO: 1063510 - DNA, 33 bp, Homo sapien
ctacatctcagcttcagcactttgcaacctata

SEQ ID NO: 1063511 - DNA, 33 bp, Homo sapien
ccaagcaatttttcgcaaaagcatgtgagtttg

SEQ ID NO: 1063512 - DNA, 33 bp, Homo sapien
ccaagcaatttttcgcgaaagcatgtgagtttg

SEQ ID NO: 1063513 - DNA, 33 bp, Homo sapien; identical to SEQ ID NO: 1063511

SEQ ID NO: 1063514 - DNA, 33 bp, Homo sapien; identical to SEQ ID NO: 1063512

SEQ ID NO: 1063515 - DNA, 33 bp, Homo sapien
atagatttaaaaactgcatcctcagtatagaga

SEQ ID NO: 1063516 - DNA, 33 bp, Homo sapien
atagatttaaaaactgtatcctcagtatagaga

SEQ ID NO: 1063517 - DNA, 33 bp, Homo sapien
caacccttccagatgaaaaataattagcacaag

SEQ ID NO: 1063518 - DNA, 33 bp, Homo sapien
caacccttccagatgagaaataattagcacaag

SEQ ID NO: 1063519 - DNA, 33 bp, Homo sapien
ttttccacttgcatgacagatctttcttcatct

SEQ ID NO: 1063520 - DNA, 33 bp, Homo sapien
ttttccacttgcatgatagatctttcttcatct

SEQ ID NO: 1063521 - DNA, 33 bp, Homo sapien
tttagtcgcaataaccaaaaacacagcttcagt

SEQ ID NO: 1063522 - DNA, 33 bp, Homo sapien
tttagtcgcaataaccgaaaacacagcttcagt

SEQ ID NO: 1063523 - DNA, 33 bp, Homo sapien; identical to SEQ ID NO: 1063521

SEQ ID NO: 1063524 - DNA, 33 bp, Homo sapien; identical to SEQ ID NO: 1063522

SEQ ID NO: 1063525 - DNA, 33 bp, Homo sapien
ccactctgccctaaaaccaaagtaaaatgctaa

SEQ ID NO: 1063526 - DNA, 33 bp, Homo sapien
ccactctgccctaaaatcaaagtaaaatgctaa

SEQ ID NO: 1063527 - DNA, 33 bp, Homo sapien
catataatcattcccaataatatccatcatggt

SEQ ID NO: 1063528 - DNA, 33 bp, Homo sapien
catataatcattcccagtaatatccatcatggt

SEQ ID NO: 1063529 - DNA, 33 bp, Homo sapien
ggccaggcagcattcactccaagctgactttag

SEQ ID NO: 1063530 - DNA, 33 bp, Homo sapien
ggccaggcagcattcattccaagctgactttag

SEQ ID NO: 1063531 - DNA, 33 bp, Homo sapien; identical to SEQ ID NO: 1063529

SEQ ID NO: 1063532 - DNA, 33 bp, Homo sapien; identical to SEQ ID NO: 1063530

SEQ ID NO: 1063533 - DNA, 33 bp, Homo sapien
ttggcaaatttgtagacgtgaactgcatcagaa

SEQ ID NO: 1063534 - DNA, 33 bp, Homo sapien
ttggcaaatttgtagatgtgaactgcatcagaa

SEQ ID NO: 1063535 - DNA, 33 bp, Homo sapien; identical to SEQ ID NO: 1063533

SEQ ID NO: 1063536 - DNA, 33 bp, Homo sapien; identical to SEQ ID NO: 1063534

SEQ ID NO: 1063537 - DNA, 33 bp, Homo sapien
tgagatcgtctgagatcaacattaaagaaaaaa

SEQ ID NO: 1063538 - DNA, 33 bp, Homo sapien
tgagatcgtctgagatgaacattaaagaaaaaa

SEQ ID NO: 1063539 - DNA, 33 bp, Homo sapien
tgggaatcattgcaaaaagaggttttcttcatg

SEQ ID NO: 1063540 - DNA, 33 bp, Homo sapien
tgggaatcattgcaaacagaggttttcttcatg

SEQ ID NO: 1063541 - DNA, 33 bp, Homo sapien
aaatttgagttgctgcaaacctgtcaactgaag

SEQ ID NO: 1063542 - DNA, 33 bp, Homo sapien
aaatttgagttgctgcgaacctgtcaactgaag

SEQ ID NO: 1063543 - DNA, 33 bp, Homo sapien
gtaccatgttgagagtcaaaggtaagactctga

SEQ ID NO: 1063544 - DNA, 33 bp, Homo sapien
gtaccatgttgagagttaaaggtaagactctga

SEQ ID NO: 1063545 - DNA, 33 bp, Homo sapien
acagaccaacaagcaaatagaaatctaataaaa

SEQ ID NO: 1063546 - DNA, 33 bp, Homo sapien
acagaccaacaagcaagtagaaatctaataaaa

SEQ ID NO: 1063547 - DNA, 33 bp, Homo sapien
aaatttaaatcaccacacatgtgaaatatgcag

SEQ ID NO: 1063548 - DNA, 33 bp, Homo sapien
aaatttaaatcaccactcatgtgaaatatgcag

SEQ ID NO: 1063549 - DNA, 33 bp, Homo sapien
ttgggatccaatcttaaagtctcaaacaactct

SEQ ID NO: 1063550 - DNA, 33 bp, Homo sapien
ttgggatccaatcttagagtctcaaacaactct

SEQ ID NO: 1063551 - DNA, 33 bp, Homo sapien
aattttggtgaaatacccagtaagttattttgg

SEQ ID NO: 1063552 - DNA, 33 bp, Homo sapien
aattttggtgaaatacgcagtaagttattttgg

SEQ ID NO: 1063553 - DNA, 33 bp, Homo sapien
ccttgcattagtctataaatgtcaattccaatc

SEQ ID NO: 1063554 - DNA, 33 bp, Homo sapien
ccttgcattagtctattaatgtcaattccaatc

SEQ ID NO: 1063555 - DNA, 33 bp, Homo sapien
ggagaaaatagttgtaacctgtacacctgataa

SEQ ID NO: 1063556 - DNA, 33 bp, Homo sapien
ggagaaaatagttgtatcctgtacacctgataa

SEQ ID NO: 1063557 - DNA, 33 bp, Homo sapien
ttctcttcatgtcttcactaacactaatctttt

SEQ ID NO: 1063558 - DNA, 33 bp, Homo sapien
ttctcttcatgtcttcgctaacactaatctttt

SEQ ID NO: 1063559 - DNA, 33 bp, Homo sapien
taatatccactgttgaggagaatattgggaaat

SEQ ID NO: 1063560 - DNA, 33 bp, Homo sapien
taatatccactgttgatgagaatattgggaaat

SEQ ID NO: 1063561 - DNA, 33 bp, Homo sapien
gatcataccctaccagaaactatttgaggatgt

SEQ ID NO: 1063562 - DNA, 33 bp, Homo sapien
gatcataccctaccaggaactatttgaggatgt

SEQ ID NO: 1063563 - DNA, 33 bp, Homo sapien
tgctaagcacacattgaattcaacagaactgaa

SEQ ID NO: 1063564 - DNA, 33 bp, Homo sapien
tgctaagcacacattgcattcaacagaactgaa

SEQ ID NO: 1063565 - DNA, 33 bp, Homo sapien
acatacttgctgagaagaatgtgaatgggagct

SEQ ID NO: 1063566 - DNA, 33 bp, Homo sapien
acatacttgctgagaataatgtgaatgggagct

SEQ ID NO: 1063567 - DNA, 33 bp, Homo sapien
aattatcccacacttccattatttattctagat

SEQ ID NO: 1063568 - DNA, 33 bp, Homo sapien
aattatcccacacttctattatttattctagat

SEQ ID NO: 1063569 - DNA, 33 bp, Homo sapien
gcccacttgccattagacctcgtctcttcacag

SEQ ID NO: 1063570 - DNA, 33 bp, Homo sapien
gcccacttgccattaggcctcgtctcttcacag

SEQ ID NO: 1063571 - DNA, 33 bp, Homo sapien
gggtaggcaggaatataactagcattcatgaca

SEQ ID NO: 1063572 - DNA, 33 bp, Homo sapien
gggtaggcaggaatatcactagcattcatgaca

SEQ ID NO: 1063573 - DNA, 33 bp, Homo sapien
ctgattactttgaggagctaaggttttggatac

SEQ ID NO: 1063574 - DNA, 33 bp, Homo sapien
ctgattactttgaggatctaaggttttggatac

SEQ ID NO: 1063575 - DNA, 33 bp, Homo sapien
aaggagaatgtctgcccaacatcaataggagga

SEQ ID NO: 1063576 - DNA, 33 bp, Homo sapien
aaggagaatgtctgcctaacatcaataggagga

SEQ ID NO: 1063577 - DNA, 33 bp, Homo sapien
cataatatagtcacccaacattacattatttca

SEQ ID NO: 1063578 - DNA, 33 bp, Homo sapien
cataatatagtcaccccacattacattatttca

SEQ ID NO: 1063579 - DNA, 33 bp, Homo sapien
atgtgataagtggtatcaagaaagctagagttg

SEQ ID NO: 1063580 - DNA, 33 bp, Homo sapien
atgtgataagtggtattaagaaagctagagttg

SEQ ID NO: 1063581 - DNA, 33 bp, Homo sapien
taacacagatccgtaagaactcaatggaaggcc

SEQ ID NO: 1063582 - DNA, 33 bp, Homo sapien
taacacagatccgtaataactcaatggaaggcc

SEQ ID NO: 1063583 - DNA, 33 bp, Homo sapien
agatgaatatggtggacgaaacaaaacttcgca

SEQ ID NO: 1063584 - DNA, 33 bp, Homo sapien
agatgaatatggtggatgaaacaaaacttcgca

SEQ ID NO: 1063585 - DNA, 33 bp, Homo sapien
cctttcctgtacatcactcttcctcagactctg

SEQ ID NO: 1063586 - DNA, 33 bp, Homo sapien
cctttcctgtacatcattcttcctcagactctg

SEQ ID NO: 1063587 - DNA, 33 bp, Homo sapien
atctcaagaacttgacactttgatggtattttt

SEQ ID NO: 1063588 - DNA, 33 bp, Homo sapien
atctcaagaacttgacgctttgatggtattttt

SEQ ID NO: 1063589 - DNA, 33 bp, Homo sapien
ttttcttgtcaaaacaagttatctgctacctct

SEQ ID NO: 1063590 - DNA, 33 bp, Homo sapien
ttttcttgtcaaaacaggttatctgctacctct

SEQ ID NO: 1063591 - DNA, 33 bp, Homo sapien
aattcacctttaactcaaattactatttccagt

SEQ ID NO: 1063592 - DNA, 33 bp, Homo sapien
aattcacctttaactcgaattactatttccagt

SEQ ID NO: 1063593 - DNA, 33 bp, Homo sapien
atcaatcaatggtctgaatgttaagtcataaac

SEQ ID NO: 1063594 - DNA, 33 bp, Homo sapien
atcaatcaatggtctggatgttaagtcataaac

SEQ ID NO: 1063595 - DNA, 33 bp, Homo sapien
taaaaaagaaaacgctcaattggtgaggatatg

SEQ ID NO: 1063596 - DNA, 33 bp, Homo sapien
taaaaaagaaaacgcttaattggtgaggatatg

SEQ ID NO: 1063597 - DNA, 33 bp, Homo sapien
ctagaccgtcttttcccgatactctctgaacca

SEQ ID NO: 1063598 - DNA, 33 bp, Homo sapien
ctagaccgtcttttcctgatactctctgaacca

SEQ ID NO: 1063599 - DNA, 33 bp, Homo sapien
acaaaaaaatgtggcaatgataaattcctccct

SEQ ID NO: 1063600 - DNA, 33 bp, Homo sapien
acaaaaaaatgtggcagtgataaattcctccct

SEQ ID NO: 1063601 - DNA, 33 bp, Homo sapien
tctttattgatactgaaaaatacagaatactcc

SEQ ID NO: 1063602 - DNA, 33 bp, Homo sapien
tctttattgatactgagaaatacagaatactcc

SEQ ID NO: 1063603 - DNA, 33 bp, Homo sapien
tctcatctgaagctagaaattctgagtctcacc

SEQ ID NO: 1063604 - DNA, 33 bp, Homo sapien
tctcatctgaagctagcaattctgagtctcacc

SEQ ID NO: 1063605 - DNA, 33 bp, Homo sapien
ctctattctctactccacttgggtactgagctg

SEQ ID NO: 1063606 - DNA, 33 bp, Homo sapien
ctctattctctactccgcttgggtactgagctg

SEQ ID NO: 1063607 - DNA, 33 bp, Homo sapien
gtgcaaaataaagtcaatcttactaacatttaa

SEQ ID NO: 1063608 - DNA, 33 bp, Homo sapien
gtgcaaaataaagtcagtcttactaacatttaa

SEQ ID NO: 1063609 - DNA, 33 bp, Homo sapien
tcttactaacatttaaaggcaaatccactatgg

SEQ ID NO: 1063610 - DNA, 33 bp, Homo sapien
tcttactaacatttaagggcaaatccactatgg

SEQ ID NO: 1063611 - DNA, 33 bp, Homo sapien
aggactctgatgaaaggatcctagacctgataa

SEQ ID NO: 1063612 - DNA, 33 bp, Homo sapien
aggactctgatgaaagtatcctagacctgataa

SEQ ID NO: 1063613 - DNA, 33 bp, Homo sapien
catagatggcacttcccattttgaaatatgttc

SEQ ID NO: 1063614 - DNA, 33 bp, Homo sapien
catagatggcacttcctattttgaaatatgttc

SEQ ID NO: 1063615 - DNA, 33 bp, Homo sapien
atgttgctatttatcaaaagtttttctgcacca

SEQ ID NO: 1063616 - DNA, 33 bp, Homo sapien
atgttgctatttatcagaagtttttctgcacca

SEQ ID NO: 1063617 - DNA, 33 bp, Homo sapien
tttttcgatagtttcaataagattgctactagc

SEQ ID NO: 1063618 - DNA, 33 bp, Homo sapien
tttttcgatagtttcagtaagattgctactagc

SEQ ID NO: 1063619 - DNA, 33 bp, Homo sapien
gttctttctagcaaaggacctaaaaatagattg

SEQ ID NO: 1063620 - DNA, 33 bp, Homo sapien
gttctttctagcaaagtacctaaaaatagattg

SEQ ID NO: 1063621 - DNA, 33 bp, Homo sapien
gatgttggcaaactgacaaactacatctgctgc

SEQ ID NO: 1063622 - DNA, 33 bp, Homo sapien
gatgttggcaaactgataaactacatctgctgc

SEQ ID NO: 1063623 - DNA, 33 bp, Homo sapien
ggcaatgaaaacactcgatgtctcttctattag

SEQ ID NO: 1063624 - DNA, 33 bp, Homo sapien
ggcaatgaaaacactctatgtctcttctattag

SEQ ID NO: 1063625 - DNA, 33 bp, Homo sapien
gtgctgccttagataaatggagagatagacaat

SEQ ID NO: 1063626 - DNA, 33 bp, Homo sapien
gtgctgccttagataagtggagagatagacaat

SEQ ID NO: 1063627 - DNA, 33 bp, Homo sapien
gatagacaatgaatgacacactcgaattttggt

SEQ ID NO: 1063628 - DNA, 33 bp, Homo sapien
gatagacaatgaatgatacactcgaattttggt

SEQ ID NO: 1063629 - DNA, 33 bp, Homo sapien
acacttcaaagcccacagcccaattaaactccc

SEQ ID NO: 1063630 - DNA, 33 bp, Homo sapien
acacttcaaagcccacggcccaattaaactccc

SEQ ID NO: 1063631 - DNA, 33 bp, Homo sapien
tggaaaatatctggctcaattagttgctaattt

SEQ ID NO: 1063632 - DNA, 33 bp, Homo sapien
tggaaaatatctggctgaattagttgctaattt

SEQ ID NO: 1063633 - DNA, 33 bp, Homo sapien
gaatgtcaaattcgaaatgcaagttactgccat

SEQ ID NO: 1063634 - DNA, 33 bp, Homo sapien
gaatgtcaaattcgaagtgcaagttactgccat

SEQ ID NO: 1063635 - DNA, 33 bp, Homo sapien
tcacaggaacaagcagaattagtccaaaaatac

SEQ ID NO: 1063636 - DNA, 33 bp, Homo sapien
tcacaggaacaagcaggattagtccaaaaatac

SEQ ID NO: 1063637 - DNA, 33 bp, Homo sapien
tttataaactattcaactatggttgcttttttt

SEQ ID NO: 1063638 - DNA, 33 bp, Homo sapien
tttataaactattcaagtatggttgcttttttt

SEQ ID NO: 1063639 - DNA, 33 bp, Homo sapien
ctactcatatagagaaacttttccctagaccac

SEQ ID NO: 1063640 - DNA, 33 bp, Homo sapien
ctactcatatagagaaccttttccctagaccac

SEQ ID NO: 1063641 - DNA, 33 bp, Homo sapien
attattgggggataataaacattctaaaatttt

SEQ ID NO: 1063642 - DNA, 33 bp, Homo sapien
attattgggggataattaacattctaaaatttt

SEQ ID NO: 1063643 - DNA, 33 bp, Homo sapien
ttaataaatattcctacgaaagcagcatttgtt

SEQ ID NO: 1063644 - DNA, 33 bp, Homo sapien
ttaataaatattcctatgaaagcagcatttgtt

SEQ ID NO: 1063645 - DNA, 33 bp, Homo sapien
aaagaaacatggctaccatattcatttgattcc

SEQ ID NO: 1063646 - DNA, 33 bp, Homo sapien
aaagaaacatggctactatattcatttgattcc

SEQ ID NO: 1063647 - DNA, 33 bp, Homo sapien
tattttaccatctcataaatctctataattatc

SEQ ID NO: 1063648 - DNA, 33 bp, Homo sapien
tattttaccatctcatcaatctctataattatc

SEQ ID NO: 1063649 - DNA, 33 bp, Homo sapien
tcattcatttttaaaccgtgtatgctacaaagg

SEQ ID NO: 1063650 - DNA, 33 bp, Homo sapien
tcattcatttttaaacggtgtatgctacaaagg

SEQ ID NO: 1063651 - DNA, 33 bp, Homo sapien
acctgcaattcgcttccagaggcactccctggg

SEQ ID NO: 1063652 - DNA, 33 bp, Homo sapien
acctgcaattcgcttctagaggcactccctggg

SEQ ID NO: 1063653 - DNA, 33 bp, Homo sapien
cgtccccagcattcagaagtagcttggggcttc

SEQ ID NO: 1063654 - DNA, 33 bp, Homo sapien
cgtccccagcattcaggagtagcttggggcttc

SEQ ID NO: 1063655 - DNA, 33 bp, Homo sapien
aatatccacatgaccaatggcaaatttgtaccg

SEQ ID NO: 1063656 - DNA, 33 bp, Homo sapien
aatatccacatgaccagtggcaaatttgtaccg

SEQ ID NO: 1063657 - DNA, 33 bp, Homo sapien
ctgaactatatgacatcaatacagacccctagt

SEQ ID NO: 1063658 - DNA, 33 bp, Homo sapien
ctgaactatatgacattaatacagacccctagt

SEQ ID NO: 1063659 - DNA, 33 bp, Homo sapien
agcttgctcaaccaacagaagagtacacaacca

SEQ ID NO: 1063660 - DNA, 33 bp, Homo sapien
agcttgctcaaccaacggaagagtacacaacca

SEQ ID NO: 1063661 - DNA, 33 bp, Homo sapien
attcaaagaagccatacgcctggagacgtgtca

SEQ ID NO: 1063662 - DNA, 33 bp, Homo sapien
attcaaagaagccatatgcctggagacgtgtca

SEQ ID NO: 1063663 - DNA, 33 bp, Homo sapien
cgtttacaccagcaaacaggttacaaacagatg

SEQ ID NO: 1063664 - DNA, 33 bp, Homo sapien
cgtttacaccagcaaagaggttacaaacagatg

SEQ ID NO: 1063665 - DNA, 33 bp, Homo sapien
ttgaagcatccactaccggctgattgcatttcc

SEQ ID NO: 1063666 - DNA, 33 bp, Homo sapien
ttgaagcatccactactggctgattgcatttcc

SEQ ID NO: 1063667 - DNA, 33 bp, Homo sapien
tttatgcatcagtaaagttgggatactggaaat

SEQ ID NO: 1063668 - DNA, 33 bp, Homo sapien
tttatgcatcagtaaatttgggatactggaaat

SEQ ID NO: 1063669 - DNA, 33 bp, Homo sapien
tgtgttcagatagttaggtttgctttatgattt

SEQ ID NO: 1063670 - DNA, 33 bp, Homo sapien
tgtgttcagatagttatgtttgctttatgattt

SEQ ID NO: 1063671 - DNA, 33 bp, Homo sapien
ttccctaaggatcctgcagactaggtagtagtt

SEQ ID NO: 1063672 - DNA, 33 bp, Homo sapien
ttccctaaggatcctgtagactaggtagtagtt

SEQ ID NO: 1063673 - DNA, 33 bp, Homo sapien
tttaaaattcgatgtagcgtgtgaaatcaatac

SEQ ID NO: 1063674 - DNA, 33 bp, Homo sapien
tttaaaattcgatgtatcgtgtgaaatcaatac

SEQ ID NO: 1063675 - DNA, 33 bp, Homo sapien
tcactgcctattgaaaccactctatcctcaatc

SEQ ID NO: 1063676 - DNA, 33 bp, Homo sapien
tcactgcctattgaaatcactctatcctcaatc

SEQ ID NO: 1063677 - DNA, 33 bp, Homo sapien
ttaatactcatgaatccatactggtataaataa

SEQ ID NO: 1063678 - DNA, 33 bp, Homo sapien
ttaatactcatgaatcgatactggtataaataa

SEQ ID NO: 1063679 - DNA, 33 bp, Homo sapien
gtgattgaaggtagccaagataaaatctgctat

SEQ ID NO: 1063680 - DNA, 33 bp, Homo sapien
gtgattgaaggtagccgagataaaatctgctat

SEQ ID NO: 1063681 - DNA, 33 bp, Homo sapien
gcagatagatacatgacgagctgtaaatgcttt

SEQ ID NO: 1063682 - DNA, 33 bp, Homo sapien
gcagatagatacatgatgagctgtaaatgcttt

SEQ ID NO: 1063683 - DNA, 33 bp, Homo sapien
tgataagcatgaaatagggtagaccactctctc

SEQ ID NO: 1063684 - DNA, 33 bp, Homo sapien
tgataagcatgaaatatggtagaccactctctc

SEQ ID NO: 1063685 - DNA, 33 bp, Homo sapien
cacaaaactttgcctaaaaatatttatagtagc

SEQ ID NO: 1063686 - DNA, 33 bp, Homo sapien
cacaaaactttgcctacaaatatttatagtagc

SEQ ID NO: 1063687 - DNA, 33 bp, Homo sapien
caagtttccacaggaaaagactgatcaccaatg

SEQ ID NO: 1063688 - DNA, 33 bp, Homo sapien
caagtttccacaggaatagactgatcaccaatg

SEQ ID NO: 1063689 - DNA, 33 bp, Homo sapien
tccccttctgagcacacggtaagattacacctg

SEQ ID NO: 1063690 - DNA, 33 bp, Homo sapien
tccccttctgagcacatggtaagattacacctg

SEQ ID NO: 1063691 - DNA, 33 bp, Homo sapien
gcttgaaataaagttaagttagtgatttataaa

SEQ ID NO: 1063692 - DNA, 33 bp, Homo sapien
gcttgaaataaagttaggttagtgatttataaa

SEQ ID NO: 1063693 - DNA, 33 bp, Homo sapien
gcatgcagtagtggggaatctgtctgcaaaggt

SEQ ID NO: 1063694 - DNA, 33 bp, Homo sapien
gcatgcagtagtgggggatctgtctgcaaaggt

SEQ ID NO: 1063695 - DNA, 33 bp, Homo sapien
ttctttctttctgagacagattgaaggacatta

SEQ ID NO: 1063696 - DNA, 33 bp, Homo sapien
ttctttctttctgagatagattgaaggacatta

SEQ ID NO: 1063697 - DNA, 33 bp, Homo sapien
aatagcatcatagaaagctgggtgaagtaaacc

SEQ ID NO: 1063698 - DNA, 33 bp, Homo sapien
aatagcatcatagaaatctgggtgaagtaaacc

SEQ ID NO: 1063699 - DNA, 33 bp, Homo sapien
tgtatgtccatctgaactccaaaagtaatatac

SEQ ID NO: 1063700 - DNA, 33 bp, Homo sapien
tgtatgtccatctgaagtccaaaagtaatatac

SEQ ID NO: 1063701 - DNA, 33 bp, Homo sapien
agaaagcaccaagctacggatttttacatttag

SEQ ID NO: 1063702 - DNA, 33 bp, Homo sapien
agaaagcaccaagctatggatttttacatttag

SEQ ID NO: 1063703 - DNA, 33 bp, Homo sapien
tgagaatgtagctcaacagcccctacataaaaa

SEQ ID NO: 1063704 - DNA, 33 bp, Homo sapien
tgagaatgtagctcaatagcccctacataaaaa

SEQ ID NO: 1063705 - DNA, 33 bp, Homo sapien
atacaaagaggaaaaacgaccagcacataggtt

SEQ ID NO: 1063706 - DNA, 33 bp, Homo sapien
atacaaagaggaaaaatgaccagcacataggtt

SEQ ID NO: 1063707 - DNA, 33 bp, Homo sapien
tttattccaactggaaaccttaactagactaaa

SEQ ID NO: 1063708 - DNA, 33 bp, Homo sapien
tttattccaactggaagccttaactagactaaa

SEQ ID NO: 1063709 - DNA, 33 bp, Homo sapien
gcattttgaatcactgcaacgcctttgaccctg

SEQ ID NO: 1063710 - DNA, 33 bp, Homo sapien
gcattttgaatcactggaacgcctttgaccctg

SEQ ID NO: 1063711 - DNA, 33 bp, Homo sapien
gaccctagaggcaaacagtgtcataaactttgt

SEQ ID NO: 1063712 - DNA, 33 bp, Homo sapien
gaccctagaggcaaacggtgtcataaactttgt

SEQ ID NO: 1063713 - DNA, 33 bp, Homo sapien
acacttccaagcaattgaattcacgtgtttagt

SEQ ID NO: 1063714 - DNA, 33 bp, Homo sapien
acacttccaagcaatttaattcacgtgtttagt

SEQ ID NO: 1063715 - DNA, 33 bp, Homo sapien
tgcaaattaaaacagcaatgagataccgctaca

SEQ ID NO: 1063716 - DNA, 33 bp, Homo sapien
tgcaaattaaaacagcgatgagataccgctaca

SEQ ID NO: 1063717 - DNA, 33 bp, Homo sapien
tcagattggctgagtaaggatttgataattgga

SEQ ID NO: 1063718 - DNA, 33 bp, Homo sapien
tcagattggctgagtagggatttgataattgga

SEQ ID NO: 1063719 - DNA, 33 bp, Homo sapien
aacaaaaaagtgcagaagttaccattattgtgt

SEQ ID NO: 1063720 - DNA, 33 bp, Homo sapien
aacaaaaaagtgcagaggttaccattattgtgt

SEQ ID NO: 1063721 - DNA, 33 bp, Homo sapien
gctctcaagcaaaaaacctcaaggatgtaaaca

SEQ ID NO: 1063722 - DNA, 33 bp, Homo sapien
gctctcaagcaaaaaagctcaaggatgtaaaca

SEQ ID NO: 1063723 - DNA, 33 bp, Homo sapien
taaacaaatgcatgacaatataaggaaaataat

SEQ ID NO: 1063724 - DNA, 33 bp, Homo sapien
taaacaaatgcatgacgatataaggaaaataat

SEQ ID NO: 1063725 - DNA, 33 bp, Homo sapien
aaaaagatatccaaacaacaatgatgagacatt

SEQ ID NO: 1063726 - DNA, 33 bp, Homo sapien
aaaaagatatccaaactacaatgatgagacatt

SEQ ID NO: 1063727 - DNA, 33 bp, Homo sapien
tttttattcccccaaaagcttaaagatcacagt

SEQ ID NO: 1063728 - DNA, 33 bp, Homo sapien
tttttattcccccaaaggcttaaagatcacagt

SEQ ID NO: 1063729 - DNA, 33 bp, Homo sapien
actctttcttaaacaaccagtcattttactcta

SEQ ID NO: 1063730 - DNA, 33 bp, Homo sapien
actctttcttaaacaagcagtcattttactcta

SEQ ID NO: 1063731 - DNA, 33 bp, Homo sapien
ttttaaaaataagctaagcatctatctagcaca

SEQ ID NO: 1063732 - DNA, 33 bp, Homo sapien
ttttaaaaataagctaggcatctatctagcaca

SEQ ID NO: 1063733 - DNA, 33 bp, Homo sapien
atgccacctcttaccaccattcgacagagtgga

SEQ ID NO: 1063734 - DNA, 33 bp, Homo sapien
atgccacctcttaccagcattcgacagagtgga

SEQ ID NO: 1063735 - DNA, 33 bp, Homo sapien
tcacaaaagctaattaagaaatgagctagagct

SEQ ID NO: 1063736 - DNA, 33 bp, Homo sapien
tcacaaaagctaattaggaaatgagctagagct

SEQ ID NO: 1063737 - DNA, 33 bp, Homo sapien
gttagcaatatatctcacaaatctattatgaac

SEQ ID NO: 1063738 - DNA, 33 bp, Homo sapien
gttagcaatatatctcgcaaatctattatgaac

SEQ ID NO: 1063739 - DNA, 33 bp, Homo sapien
gtttcaatttattttaacccatgaacacctttt

SEQ ID NO: 1063740 - DNA, 33 bp, Homo sapien
gtttcaatttattttagcccatgaacacctttt

SEQ ID NO: 1063741 - DNA, 33 bp, Homo sapien
gctcttggtcaattcacgtttgtgtacttctat

SEQ ID NO: 1063742 - DNA, 33 bp, Homo sapien
gctcttggtcaattcatgtttgtgtacttctat

SEQ ID NO: 1063743 - DNA, 33 bp, Homo sapien
tattatttgtgtagtaaattttgaaaggatcca

SEQ ID NO: 1063744 - DNA, 33 bp, Homo sapien
tattatttgtgtagtagattttgaaaggatcca

SEQ ID NO: 1063745 - DNA, 33 bp, Homo sapien
ggagcaggagaaagaaagtgaagaaggagatgc

SEQ ID NO: 1063746 - DNA, 33 bp, Homo sapien
ggagcaggagaaagaacgtgaagaaggagatgc

SEQ ID NO: 1063747 - DNA, 33 bp, Homo sapien
aaagtgtgaagagacacatggttaggtaaattt

SEQ ID NO: 1063748 - DNA, 33 bp, Homo sapien
aaagtgtgaagagacatatggttaggtaaattt

SEQ ID NO: 1063749 - DNA, 33 bp, Homo sapien
atgacctgttggaataacatttttataacaaca

SEQ ID NO: 1063750 - DNA, 33 bp, Homo sapien
atgacctgttggaatatcatttttataacaaca

SEQ ID NO: 1063751 - DNA, 33 bp, Homo sapien
ggacagattttatgaacggataacatttaaagc

SEQ ID NO: 1063752 - DNA, 33 bp, Homo sapien
ggacagattttatgaatggataacatttaaagc

SEQ ID NO: 1063753 - DNA, 33 bp, Homo sapien
tatatttctctgctaaatccaatgacatatagc

SEQ ID NO: 1063754 - DNA, 33 bp, Homo sapien
tatatttctctgctaattccaatgacatatagc

SEQ ID NO: 1063755 - DNA, 33 bp, Homo sapien
atatccatttgataggcagtaggatggtaaaga

SEQ ID NO: 1063756 - DNA, 33 bp, Homo sapien
atatccatttgataggtagtaggatggtaaaga

SEQ ID NO: 1063757 - DNA, 33 bp, Homo sapien
aatcctgcactttcaaagttatatccaccaaga

SEQ ID NO: 1063758 - DNA, 33 bp, Homo sapien
aatcctgcactttcaaggttatatccaccaaga

SEQ ID NO: 1063759 - DNA, 33 bp, Homo sapien
gaagatcagttctccaaaaagtcaatgcgtttt

SEQ ID NO: 1063760 - DNA, 33 bp, Homo sapien
gaagatcagttctccagaaagtcaatgcgtttt

SEQ ID NO: 1063761 - DNA, 33 bp, Homo sapien
ctttttcacagtcttgcagcctagaggtctgag

SEQ ID NO: 1063762 - DNA, 33 bp, Homo sapien
ctttttcacagtcttgtagcctagaggtctgag

SEQ ID NO: 1063763 - DNA, 33 bp, Homo sapien
atagtgagaaaaatacactaaaatgccttgtgt

SEQ ID NO: 1063764 - DNA, 33 bp, Homo sapien
atagtgagaaaaatacgctaaaatgccttgtgt

SEQ ID NO: 1063765 - DNA, 33 bp, Homo sapien
ggcccaactttggcagaaaattaggaagagtta

SEQ ID NO: 1063766 - DNA, 33 bp, Homo sapien
ggcccaactttggcagcaaattaggaagagtta

SEQ ID NO: 1063767 - DNA, 33 bp, Homo sapien
gagatccgcaaaggtacactgcttgacctcccc

SEQ ID NO: 1063768 - DNA, 33 bp, Homo sapien
gagatccgcaaaggtatactgcttgacctcccc

SEQ ID NO: 1063769 - DNA, 33 bp, Homo sapien
ctaattccatttgtaacaacatatcaggttatc

SEQ ID NO: 1063770 - DNA, 33 bp, Homo sapien
ctaattccatttgtaagaacatatcaggttatc

SEQ ID NO: 1063771 - DNA, 33 bp, Homo sapien
ccacatcatcaataaggacattaagaaggacag

SEQ ID NO: 1063772 - DNA, 33 bp, Homo sapien
ccacatcatcaataagtacattaagaaggacag

SEQ ID NO: 1063773 - DNA, 33 bp, Homo sapien
cttctgatgcttagaacgtgttccttgctatta

SEQ ID NO: 1063774 - DNA, 33 bp, Homo sapien
cttctgatgcttagaatgtgttccttgctatta

SEQ ID NO: 1063775 - DNA, 33 bp, Homo sapien
agccctgttgagataaacacacgctgtcttctg

SEQ ID NO: 1063776 - DNA, 33 bp, Homo sapien
agccctgttgagataagcacacgctgtcttctg

SEQ ID NO: 1063777 - DNA, 33 bp, Homo sapien
cgcaaggcattccaaacgttgcctttttcactg

SEQ ID NO: 1063778 - DNA, 33 bp, Homo sapien
cgcaaggcattccaaatgttgcctttttcactg

SEQ ID NO: 1063779 - DNA, 33 bp, Homo sapien
ctctaacttattctgaagagtttattgctcatt

SEQ ID NO: 1063780 - DNA, 33 bp, Homo sapien
ctctaacttattctgaggagtttattgctcatt

SEQ ID NO: 1063781 - DNA, 33 bp, Homo sapien
atctggcacataattgaacatgagaaattcatt

SEQ ID NO: 1063782 - DNA, 33 bp, Homo sapien
atctggcacataattggacatgagaaattcatt

SEQ ID NO: 1063783 - DNA, 33 bp, Homo sapien
aacgtcaaagttagtgaattccagagttggcct

SEQ ID NO: 1063784 - DNA, 33 bp, Homo sapien
aacgtcaaagttagtggattccagagttggcct

SEQ ID NO: 1063785 - DNA, 33 bp, Homo sapien
gaaggacgtcaaagcaacctttaaaatattttc

SEQ ID NO: 1063786 - DNA, 33 bp, Homo sapien
gaaggacgtcaaagcagcctttaaaatattttc

SEQ ID NO: 1063787 - DNA, 33 bp, Homo sapien
tacagttatgatcgtcaaagtcctccagacggc

SEQ ID NO: 1063788 - DNA, 33 bp, Homo sapien
tacagttatgatcgtcgaagtcctccagacggc

SEQ ID NO: 1063789 - DNA, 33 bp, Homo sapien
atgaatggtagaggaaaccttaccacttctcta

SEQ ID NO: 1063790 - DNA, 33 bp, Homo sapien
atgaatggtagaggaagccttaccacttctcta

SEQ ID NO: 1063791 - DNA, 33 bp, Homo sapien
tgacacgtgggctgagaatcctgtgcacaggat

SEQ ID NO: 1063792 - DNA, 33 bp, Homo sapien
tgacacgtgggctgagcatcctgtgcacaggat

SEQ ID NO: 1063793 - DNA, 33 bp, Homo sapien
aaaagtctaatcatccacataaatcaaagcaag

SEQ ID NO: 1063794 - DNA, 33 bp, Homo sapien
aaaagtctaatcatccgcataaatcaaagcaag

SEQ ID NO: 1063795 - DNA, 33 bp, Homo sapien
cccaattcaacaaaaaggtgaaacagtataacg

SEQ ID NO: 1063796 - DNA, 33 bp, Homo sapien
cccaattcaacaaaaatgtgaaacagtataacg

SEQ ID NO: 1063797 - DNA, 33 bp, Homo sapien
tataattgcttgtttaacttcatattacactaa

SEQ ID NO: 1063798 - DNA, 33 bp, Homo sapien
tataattgcttgtttatcttcatattacactaa

SEQ ID NO: 1063799 - DNA, 33 bp, Homo sapien
tctccctttcagaataagaatgcttacctaatg

SEQ ID NO: 1063800 - DNA, 33 bp, Homo sapien
tctccctttcagaataggaatgcttacctaatg

SEQ ID NO: 1063801 - DNA, 33 bp, Homo sapien
tattcaccaactctcaccagtaattggttaagg

SEQ ID NO: 1063802 - DNA, 33 bp, Homo sapien
tattcaccaactctcatcagtaattggttaagg

SEQ ID NO: 1063803 - DNA, 33 bp, Homo sapien
acagtcacaattcctgaaagtctggctggtgtg

SEQ ID NO: 1063804 - DNA, 33 bp, Homo sapien
acagtcacaattcctggaagtctggctggtgtg

SEQ ID NO: 1063805 - DNA, 33 bp, Homo sapien
acacccatatctctaaccgtctacaaaaatcaa

SEQ ID NO: 1063806 - DNA, 33 bp, Homo sapien
acacccatatctctaatcgtctacaaaaatcaa

SEQ ID NO: 1063807 - DNA, 33 bp, Homo sapien
ttacaactaagtctaacctgctgtatttgaata

SEQ ID NO: 1063808 - DNA, 33 bp, Homo sapien
ttacaactaagtctaagctgctgtatttgaata

SEQ ID NO: 1063809 - DNA, 33 bp, Homo sapien
aggaagaaaatagtacacgaaacatcaaggaat

SEQ ID NO: 1063810 - DNA, 33 bp, Homo sapien
aggaagaaaatagtacgcgaaacatcaaggaat

SEQ ID NO: 1063811 - DNA, 33 bp, Homo sapien
ttaatacagtacctagaaattcgtcaaaaatat

SEQ ID NO: 1063812 - DNA, 33 bp, Homo sapien
ttaatacagtacctagcaattcgtcaaaaatat

SEQ ID NO: 1063813 - DNA, 33 bp, Homo sapien
gccatcccgttggtgacaagtaagctctcattt

SEQ ID NO: 1063814 - DNA, 33 bp, Homo sapien
gccatcccgttggtgataagtaagctctcattt

SEQ ID NO: 1063815 - DNA, 33 bp, Homo sapien
tgattattgcaccaaggatgtaaactctctaac

SEQ ID NO: 1063816 - DNA, 33 bp, Homo sapien
tgattattgcaccaagtatgtaaactctctaac

SEQ ID NO: 1063817 - DNA, 33 bp, Homo sapien
atttttgcattcattaacaattttttggcaatg

SEQ ID NO: 1063818 - DNA, 33 bp, Homo sapien
atttttgcattcattagcaattttttggcaatg

SEQ ID NO: 1063819 - DNA, 33 bp, Homo sapien
aatgttgtcagggaccagcataaatgactcaca

SEQ ID NO: 1063820 - DNA, 33 bp, Homo sapien
aatgttgtcagggaccggcataaatgactcaca

SEQ ID NO: 1063821 - DNA, 33 bp, Homo sapien
tctgcaagaagatatacaggccacaggattcaa

SEQ ID NO: 1063822 - DNA, 33 bp, Homo sapien
tctgcaagaagatatagaggccacaggattcaa

SEQ ID NO: 1063823 - DNA, 33 bp, Homo sapien
tttattcaagaagccaataacttgggggtggca

SEQ ID NO: 1063824 - DNA, 33 bp, Homo sapien
tttattcaagaagccagtaacttgggggtggca

SEQ ID NO: 1063825 - DNA, 33 bp, Homo sapien
tgaaggacctgcttgacactgttttacagctat

SEQ ID NO: 1063826 - DNA, 33 bp, Homo sapien
tgaaggacctgcttgagactgttttacagctat

SEQ ID NO: 1063827 - DNA, 33 bp, Homo sapien
aattccaggaagagaaataggtaaatgtacaca

SEQ ID NO: 1063828 - DNA, 33 bp, Homo sapien
aattccaggaagagaattaggtaaatgtacaca

SEQ ID NO: 1063829 - DNA, 33 bp, Homo sapien
ttgaccactctaggtaactccaataagtggatt

SEQ ID NO: 1063830 - DNA, 33 bp, Homo sapien
ttgaccactctaggtatctccaataagtggatt

SEQ ID NO: 1063831 - DNA, 33 bp, Homo sapien
gaattggaagctagcaataatctgagccaaaat

SEQ ID NO: 1063832 - DNA, 33 bp, Homo sapien
gaattggaagctagcagtaatctgagccaaaat

SEQ ID NO: 1063833 - DNA, 33 bp, Homo sapien
gacttgagattctagaagagttactttaaaacc

SEQ ID NO: 1063834 - DNA, 33 bp, Homo sapien
gacttgagattctagacgagttactttaaaacc

SEQ ID NO: 1063835 - DNA, 33 bp, Homo sapien
ggtatcaagaagaaagcatttttcagatcagta

SEQ ID NO: 1063836 - DNA, 33 bp, Homo sapien
ggtatcaagaagaaagtatttttcagatcagta

SEQ ID NO: 1063837 - DNA, 33 bp, Homo sapien
acctgttagtaaagcccaccaaagtgttttgct

SEQ ID NO: 1063838 - DNA, 33 bp, Homo sapien
acctgttagtaaagcctaccaaagtgttttgct

SEQ ID NO: 1063839 - DNA, 33 bp, Homo sapien
gtgtgtttctgtaacaaagtcaaaccagagaaa

SEQ ID NO: 1063840 - DNA, 33 bp, Homo sapien
gtgtgtttctgtaacagagtcaaaccagagaaa

SEQ ID NO: 1063841 - DNA, 33 bp, Homo sapien
ggtgattctttaaagcactaaaagtagatctac

SEQ ID NO: 1063842 - DNA, 33 bp, Homo sapien
ggtgattctttaaagcgctaaaagtagatctac

SEQ ID NO: 1063843 - DNA, 33 bp, Homo sapien
taaatgtgtatcaatgacataattggataaagg

SEQ ID NO: 1063844 - DNA, 33 bp, Homo sapien
taaatgtgtatcaatgtcataattggataaagg

SEQ ID NO: 1063845 - DNA, 33 bp, Homo sapien
ctgagacacagggtaccaactctctaggctaca

SEQ ID NO: 1063846 - DNA, 33 bp, Homo sapien
ctgagacacagggtacgaactctctaggctaca

SEQ ID NO: 1063847 - DNA, 33 bp, Homo sapien
aactaactggtggcagactaattatattggccc

SEQ ID NO: 1063848 - DNA, 33 bp, Homo sapien
aactaactggtggcaggctaattatattggccc

SEQ ID NO: 1063849 - DNA, 33 bp, Homo sapien
taacctcataggaacaagaaggaaacattttgc

SEQ ID NO: 1063850 - DNA, 33 bp, Homo sapien
taacctcataggaacaggaaggaaacattttgc

SEQ ID NO: 1063851 - DNA, 33 bp, Homo sapien
aaccttcatttctgaacggtctgagccattgtt

SEQ ID NO: 1063852 - DNA, 33 bp, Homo sapien
aaccttcatttctgaagggtctgagccattgtt

SEQ ID NO: 1063853 - DNA, 33 bp, Homo sapien
aattatcaaattatgcaagggaattataaaaca

SEQ ID NO: 1063854 - DNA, 33 bp, Homo sapien
aattatcaaattatgcgagggaattataaaaca

SEQ ID NO: 1063855 - DNA, 33 bp, Homo sapien
tactgattgtgaatgcaaaatatctgacacagg

SEQ ID NO: 1063856 - DNA, 33 bp, Homo sapien
tactgattgtgaatgcgaaatatctgacacagg

SEQ ID NO: 1063857 - DNA, 33 bp, Homo sapien
tgatggttctggtaaacatggaaaagcagcagt

SEQ ID NO: 1063858 - DNA, 33 bp, Homo sapien
tgatggttctggtaaatatggaaaagcagcagt

SEQ ID NO: 1063859 - DNA, 33 bp, Homo sapien
acctcaccacatctcaacctaactaaacacacc

SEQ ID NO: 1063860 - DNA, 33 bp, Homo sapien
acctcaccacatctcatcctaactaaacacacc

SEQ ID NO: 1063861 - DNA, 33 bp, Homo sapien
ggaatccaatgtaacaatgaagggcaatccaga

SEQ ID NO: 1063862 - DNA, 33 bp, Homo sapien
ggaatccaatgtaacagtgaagggcaatccaga

SEQ ID NO: 1063863 - DNA, 33 bp, Homo sapien
attctagctgcacgggcagttgattatatggtg

SEQ ID NO: 1063864 - DNA, 33 bp, Homo sapien
attctagctgcacgggtagttgattatatggtg

SEQ ID NO: 1063865 - DNA, 33 bp, Homo sapien
ttttatattacctatccctttgttgaaattatt

SEQ ID NO: 1063866 - DNA, 33 bp, Homo sapien
ttttatattacctatctctttgttgaaattatt

SEQ ID NO: 1063867 - DNA, 33 bp, Homo sapien
tatatccacaagcaaaaaggtaaaattggaccc

SEQ ID NO: 1063868 - DNA, 33 bp, Homo sapien
tatatccacaagcaaacaggtaaaattggaccc

SEQ ID NO: 1063869 - DNA, 33 bp, Homo sapien
tgccacactttaaaaccacaagctctcgtgaga

SEQ ID NO: 1063870 - DNA, 33 bp, Homo sapien
tgccacactttaaaactacaagctctcgtgaga

SEQ ID NO: 1063871 - DNA, 33 bp, Homo sapien
ctctagatatgggaaaatcttctcgagaagtat

SEQ ID NO: 1063872 - DNA, 33 bp, Homo sapien
ctctagatatgggaaagtcttctcgagaagtat

SEQ ID NO: 1063873 - DNA, 33 bp, Homo sapien
atgacatttctaaacccaccctgggctagaagg

SEQ ID NO: 1063874 - DNA, 33 bp, Homo sapien
atgacatttctaaaccgaccctgggctagaagg

SEQ ID NO: 1063875 - DNA, 33 bp, Homo sapien
cctagattgcatttcaagtttacttagggcacc

SEQ ID NO: 1063876 - DNA, 33 bp, Homo sapien
cctagattgcatttcacgtttacttagggcacc

SEQ ID NO: 1063877 - DNA, 33 bp, Homo sapien
gatgaacatcgagaaacatcaggaccatccagg

SEQ ID NO: 1063878 - DNA, 33 bp, Homo sapien
gatgaacatcgagaaatatcaggaccatccagg

SEQ ID NO: 1063879 - DNA, 33 bp, Homo sapien
gtgacctgcctttccaagttgtcattcagaagc

SEQ ID NO: 1063880 - DNA, 33 bp, Homo sapien
gtgacctgcctttccaggttgtcattcagaagc

SEQ ID NO: 1063881 - DNA, 33 bp, Homo sapien
aaagccgttactttgccactgagagttaacctt

SEQ ID NO: 1063882 - DNA, 33 bp, Homo sapien
aaagccgttactttgctactgagagttaacctt

SEQ ID NO: 1063883 - DNA, 33 bp, Homo sapien
tgcttgctattgctgacaggagaaagtatagat

SEQ ID NO: 1063884 - DNA, 33 bp, Homo sapien
tgcttgctattgctgataggagaaagtatagat

SEQ ID NO: 1063885 - DNA, 33 bp, Homo sapien
cgtagatagccatgggccatactaacattttaa

SEQ ID NO: 1063886 - DNA, 33 bp, Homo sapien
cgtagatagccatgggtcatactaacattttaa

SEQ ID NO: 1063887 - DNA, 33 bp, Homo sapien
cccagtgctgttttgcgctagtcaatgaaaata

SEQ ID NO: 1063888 - DNA, 33 bp, Homo sapien
cccagtgctgttttgctctagtcaatgaaaata

SEQ ID NO: 1063889 - DNA, 33 bp, Homo sapien
ttcaaagtctcatcgaaatatttagatcagata

SEQ ID NO: 1063890 - DNA, 33 bp, Homo sapien
ttcaaagtctcatcgagatatttagatcagata

SEQ ID NO: 1063891 - DNA, 33 bp, Homo sapien
agaggattatttttgacacttaatgtcttacgg

SEQ ID NO: 1063892 - DNA, 33 bp, Homo sapien
agaggattatttttgagacttaatgtcttacgg

SEQ ID NO: 1063893 - DNA, 33 bp, Homo sapien
tacccaatgcctgtaccccatcatatcttggaa

SEQ ID NO: 1063894 - DNA, 33 bp, Homo sapien
tacccaatgcctgtacgccatcatatcttggaa

SEQ ID NO: 1063895 - DNA, 33 bp, Homo sapien
gagacccaataccatgcagatttcaagcttgac

SEQ ID NO: 1063896 - DNA, 33 bp, Homo sapien
gagacccaataccatgtagatttcaagcttgac

SEQ ID NO: 1063897 - DNA, 33 bp, Homo sapien
tctaaaaggaaagactcagtcctggtagaattc

SEQ ID NO: 1063898 - DNA, 33 bp, Homo sapien
tctaaaaggaaagacttagtcctggtagaattc

SEQ ID NO: 1063899 - DNA, 33 bp, Homo sapien
tcctgtttctcaattaactgtctccacaaaaac

SEQ ID NO: 1063900 - DNA, 33 bp, Homo sapien
tcctgtttctcaattatctgtctccacaaaaac

SEQ ID NO: 1063901 - DNA, 33 bp, Homo sapien
agaactgtttattgataaaagcaagtccactct

SEQ ID NO: 1063902 - DNA, 33 bp, Homo sapien
agaactgtttattgatgaaagcaagtccactct

SEQ ID NO: 1063903 - DNA, 33 bp, Homo sapien
aattctaaaaaatcaaaattgccaaagtataat

SEQ ID NO: 1063904 - DNA, 33 bp, Homo sapien
aattctaaaaaatcaagattgccaaagtataat

SEQ ID NO: 1063905 - DNA, 33 bp, Homo sapien
gagcactatacttctgaacatattaggtatatc

SEQ ID NO: 1063906 - DNA, 33 bp, Homo sapien
gagcactatacttctggacatattaggtatatc

SEQ ID NO: 1063907 - DNA, 33 bp, Homo sapien
agtacatactgataaacattttgttagccttaa

SEQ ID NO: 1063908 - DNA, 33 bp, Homo sapien
agtacatactgataaatattttgttagccttaa

SEQ ID NO: 1063909 - DNA, 33 bp, Homo sapien
actcctactacaattcaatagttttaatcctac

SEQ ID NO: 1063910 - DNA, 33 bp, Homo sapien
actcctactacaattcgatagttttaatcctac

SEQ ID NO: 1063911 - DNA, 33 bp, Homo sapien
ttaaaaaggcttctagacactgcctgtgtatta

SEQ ID NO: 1063912 - DNA, 33 bp, Homo sapien
ttaaaaaggcttctaggcactgcctgtgtatta

SEQ ID NO: 1063913 - DNA, 33 bp, Homo sapien
tggtacagaattgtcaataagtttaagttcact

SEQ ID NO: 1063914 - DNA, 33 bp, Homo sapien
tggtacagaattgtcagtaagtttaagttcact

SEQ ID NO: 1063915 - DNA, 33 bp, Homo sapien
actatccttgttcgcacataatataatactgaa

SEQ ID NO: 1063916 - DNA, 33 bp, Homo sapien
actatccttgttcgcagataatataatactgaa

SEQ ID NO: 1063917 - DNA, 33 bp, Homo sapien
tcattaatagagctaacgttaagagagttccta

SEQ ID NO: 1063918 - DNA, 33 bp, Homo sapien
tcattaatagagctaatgttaagagagttccta

SEQ ID NO: 1063919 - DNA, 33 bp, Homo sapien
gccactgcctgagagaatctacctgtgcagcca

SEQ ID NO: 1063920 - DNA, 33 bp, Homo sapien
gccactgcctgagagagtctacctgtgcagcca

SEQ ID NO: 1063921 - DNA, 33 bp, Homo sapien
atgaaaaatgtctaagaaactgttgcaaatcaa

SEQ ID NO: 1063922 - DNA, 33 bp, Homo sapien
atgaaaaatgtctaaggaactgttgcaaatcaa

SEQ ID NO: 1063923 - DNA, 33 bp, Homo sapien
aacactgagaacgttacgttaaaagaaataaga

SEQ ID NO: 1063924 - DNA, 33 bp, Homo sapien
aacactgagaacgttatgttaaaagaaataaga

SEQ ID NO: 1063925 - DNA, 33 bp, Homo sapien
aaagaaaattctgtcacgttacagcacaaatga

SEQ ID NO: 1063926 - DNA, 33 bp, Homo sapien
aaagaaaattctgtcatgttacagcacaaatga

SEQ ID NO: 1063927 - DNA, 33 bp, Homo sapien
agatacagtatcaaagccatggttgataacaaa

SEQ ID NO: 1063928 - DNA, 33 bp, Homo sapien
agatacagtatcaaaggcatggttgataacaaa

SEQ ID NO: 1063929 - DNA, 33 bp, Homo sapien
gttaatttctccttacacttagagcactcagaa

SEQ ID NO: 1063930 - DNA, 33 bp, Homo sapien
gttaatttctccttacccttagagcactcagaa

SEQ ID NO: 1063931 - DNA, 33 bp, Homo sapien
aaaagccttattcacaatatccctggaaacaag

SEQ ID NO: 1063932 - DNA, 33 bp, Homo sapien
aaaagccttattcacagtatccctggaaacaag

SEQ ID NO: 1063933 - DNA, 33 bp, Homo sapien
ttcagatttttactagaagcatcattgacacaa

SEQ ID NO: 1063934 - DNA, 33 bp, Homo sapien
ttcagatttttactagtagcatcattgacacaa

SEQ ID NO: 1063935 - DNA, 33 bp, Homo sapien
actctgatctctccccagaaccaagtgcctgag

SEQ ID NO: 1063936 - DNA, 33 bp, Homo sapien
actctgatctctccccggaaccaagtgcctgag

SEQ ID NO: 1063937 - DNA, 33 bp, Homo sapien
acatacttcagctcagcaatgcctgataaaggt

SEQ ID NO: 1063938 - DNA, 33 bp, Homo sapien
acatacttcagctcagtaatgcctgataaaggt

SEQ ID NO: 1063939 - DNA, 33 bp, Homo sapien
tgtcttcaaaagggaaagccatatgaacaaact

SEQ ID NO: 1063940 - DNA, 33 bp, Homo sapien
tgtcttcaaaagggaaggccatatgaacaaact

SEQ ID NO: 1063941 - DNA, 33 bp, Homo sapien
aaccactttcccagaaaagaatatgaagtcctt

SEQ ID NO: 1063942 - DNA, 33 bp, Homo sapien
aaccactttcccagaagagaatatgaagtcctt

SEQ ID NO: 1063943 - DNA, 33 bp, Homo sapien
gtaatccactagcaaagtttgcactttttgtat

SEQ ID NO: 1063944 - DNA, 33 bp, Homo sapien
gtaatccactagcaaattttgcactttttgtat

SEQ ID NO: 1063945 - DNA, 33 bp, Homo sapien
cctatgaatcctagcaatagagagacagcacca

SEQ ID NO: 1063946 - DNA, 33 bp, Homo sapien
cctatgaatcctagcagtagagagacagcacca

SEQ ID NO: 1063947 - DNA, 33 bp, Homo sapien
tctgtaagtccagagacggtaattttggaagat

SEQ ID NO: 1063948 - DNA, 33 bp, Homo sapien
tctgtaagtccagagatggtaattttggaagat

SEQ ID NO: 1063949 - DNA, 33 bp, Homo sapien
attataaaagaaggccaaatgtatgactcattt

SEQ ID NO: 1063950 - DNA, 33 bp, Homo sapien
attataaaagaaggccgaatgtatgactcattt

SEQ ID NO: 1063951 - DNA, 33 bp, Homo sapien
tttgcattcgaaatgcacaaagaacccttaaaa

SEQ ID NO: 1063952 - DNA, 33 bp, Homo sapien
tttgcattcgaaatgctcaaagaacccttaaaa

SEQ ID NO: 1063953 - DNA, 33 bp, Homo sapien
ttcatttgcatatttaccatctatacatcttta

SEQ ID NO: 1063954 - DNA, 33 bp, Homo sapien
ttcatttgcatatttatcatctatacatcttta

SEQ ID NO: 1063955 - DNA, 33 bp, Homo sapien
caagcatttgagtaaaccaaagaggttgaaaga

SEQ ID NO: 1063956 - DNA, 33 bp, Homo sapien
caagcatttgagtaaagcaaagaggttgaaaga

SEQ ID NO: 1063957 - DNA, 33 bp, Homo sapien
agactatgttcttcaacgtagagtggtctgttt

SEQ ID NO: 1063958 - DNA, 33 bp, Homo sapien
agactatgttcttcaatgtagagtggtctgttt

SEQ ID NO: 1063959 - DNA, 33 bp, Homo sapien
ttgactgaatctacctcaaactacaatcaaatc

SEQ ID NO: 1063960 - DNA, 33 bp, Homo sapien
ttgactgaatctacctgaaactacaatcaaatc

SEQ ID NO: 1063961 - DNA, 33 bp, Homo sapien
agattttcatcaactacgttctaaaattcagta

SEQ ID NO: 1063962 - DNA, 33 bp, Homo sapien
agattttcatcaactatgttctaaaattcagta

SEQ ID NO: 1063963 - DNA, 33 bp, Homo sapien
agtacattctcagtgaagtctatcctaaagaca

SEQ ID NO: 1063964 - DNA, 33 bp, Homo sapien
agtacattctcagtgaggtctatcctaaagaca

SEQ ID NO: 1063965 - DNA, 33 bp, Homo sapien
actaacatacagagctaactggagattgtgcaa

SEQ ID NO: 1063966 - DNA, 33 bp, Homo sapien
actaacatacagagctgactggagattgtgcaa

SEQ ID NO: 1063967 - DNA, 33 bp, Homo sapien
gcctgggtcatattccaaaatctttcaatgacc

SEQ ID NO: 1063968 - DNA, 33 bp, Homo sapien
gcctgggtcatattccgaaatctttcaatgacc

SEQ ID NO: 1063969 - DNA, 33 bp, Homo sapien
cttctatcttggttaaatacgtctcctatctgg

SEQ ID NO: 1063970 - DNA, 33 bp, Homo sapien
cttctatcttggttaagtacgtctcctatctgg

SEQ ID NO: 1063971 - DNA, 33 bp, Homo sapien
tgtgcacagttgaaaaagtctggcctattggct

SEQ ID NO: 1063972 - DNA, 33 bp, Homo sapien
tgtgcacagttgaaaaggtctggcctattggct

SEQ ID NO: 1063973 - DNA, 33 bp, Homo sapien
cgcataaaatacttgaagcatcgtggtgaaatt

SEQ ID NO: 1063974 - DNA, 33 bp, Homo sapien
cgcataaaatacttgacgcatcgtggtgaaatt

SEQ ID NO: 1063975 - DNA, 33 bp, Homo sapien
gatagctatccatttacgcatttatcctttgtg

SEQ ID NO: 1063976 - DNA, 33 bp, Homo sapien
gatagctatccatttatgcatttatcctttgtg

SEQ ID NO: 1063977 - DNA, 33 bp, Homo sapien
cagatgcgaacttatcactattaaattcagtta

SEQ ID NO: 1063978 - DNA, 33 bp, Homo sapien
cagatgcgaacttatcgctattaaattcagtta

SEQ ID NO: 1063979 - DNA, 33 bp, Homo sapien
agatgcttagaggatggcataattttaggaaat

SEQ ID NO: 1063980 - DNA, 33 bp, Homo sapien
agatgcttagaggatgtcataattttaggaaat

SEQ ID NO: 1063981 - DNA, 33 bp, Homo sapien
ccaactggctattgtaggaaccaaactcagact

SEQ ID NO: 1063982 - DNA, 33 bp, Homo sapien
ccaactggctattgtatgaaccaaactcagact

SEQ ID NO: 1063983 - DNA, 33 bp, Homo sapien
tgatctgtgaactaaaagcagtccttctcattc

SEQ ID NO: 1063984 - DNA, 33 bp, Homo sapien
tgatctgtgaactaaacgcagtccttctcattc

SEQ ID NO: 1063985 - DNA, 33 bp, Homo sapien
cccgtcaccctggtaacgagcagaaaatccaac

SEQ ID NO: 1063986 - DNA, 33 bp, Homo sapien
cccgtcaccctggtaatgagcagaaaatccaac

SEQ ID NO: 1063987 - DNA, 33 bp, Homo sapien
ttttattggaattgtacgtaatataggagtaat

SEQ ID NO: 1063988 - DNA, 33 bp, Homo sapien
ttttattggaattgtatgtaatataggagtaat

SEQ ID NO: 1063989 - DNA, 33 bp, Homo sapien
tgtccaattgtgtatacggagcaactgatttct

SEQ ID NO: 1063990 - DNA, 33 bp, Homo sapien
tgtccaattgtgtatatggagcaactgatttct

SEQ ID NO: 1063991 - DNA, 33 bp, Homo sapien
ctgttgaacctgcagaacacacaacggtttgtc

SEQ ID NO: 1063992 - DNA, 33 bp, Homo sapien
ctgttgaacctgcagagcacacaacggtttgtc

SEQ ID NO: 1063993 - DNA, 33 bp, Homo sapien
tccaaaggtagaggaaacttacccagtacccac

SEQ ID NO: 1063994 - DNA, 33 bp, Homo sapien
tccaaaggtagaggaaccttacccagtacccac

SEQ ID NO: 1063995 - DNA, 33 bp, Homo sapien
tacttatagattggcaactagtggtcttgggcc

SEQ ID NO: 1063996 - DNA, 33 bp, Homo sapien
tacttatagattggcacctagtggtcttgggcc

SEQ ID NO: 1063997 - DNA, 33 bp, Homo sapien
ctcacatttgtagcaacgtttcaaatgaatttt

SEQ ID NO: 1063998 - DNA, 33 bp, Homo sapien
ctcacatttgtagcaatgtttcaaatgaatttt

SEQ ID NO: 1063999 - DNA, 33 bp, Homo sapien
gctttgtcacttgggacggtacgtttgattaaa

SEQ ID NO: 1064000 - DNA, 33 bp, Homo sapien
gctttgtcacttgggagggtacgtttgattaaa

SEQ ID NO: 1064001 - DNA, 33 bp, Homo sapien
ctaaaagaaattctgaaaaaattgccttcattc

SEQ ID NO: 1064002 - DNA, 33 bp, Homo sapien
ctaaaagaaattctgagaaaattgccttcattc

SEQ ID NO: 1064003 - DNA, 33 bp, Homo sapien
atgccgtgtgtgagtaaacttagttgtcctgta

SEQ ID NO: 1064004 - DNA, 33 bp, Homo sapien
atgccgtgtgtgagtagacttagttgtcctgta

SEQ ID NO: 1064005 - DNA, 33 bp, Homo sapien
ctgagtgattccaagagtagcataaaccccgag

SEQ ID NO: 1064006 - DNA, 33 bp, Homo sapien
ctgagtgattccaagattagcataaaccccgag

SEQ ID NO: 1064007 - DNA, 33 bp, Homo sapien
tcctattttatgaacccgatcacaacttacaca

SEQ ID NO: 1064008 - DNA, 33 bp, Homo sapien
tcctattttatgaacctgatcacaacttacaca

SEQ ID NO: 1064009 - DNA, 33 bp, Homo sapien
acccaatgtcacttaacgcaggtaatacttcca

SEQ ID NO: 1064010 - DNA, 33 bp, Homo sapien
acccaatgtcacttaatgcaggtaatacttcca

SEQ ID NO: 1064011 - DNA, 33 bp, Homo sapien
ttgtattcctatctgactcaagtgtttcactga

SEQ ID NO: 1064012 - DNA, 33 bp, Homo sapien
ttgtattcctatctgattcaagtgtttcactga

SEQ ID NO: 1064013 - DNA, 33 bp, Homo sapien
ttcctcttcattttccacagtaactgccagtgc

SEQ ID NO: 1064014 - DNA, 33 bp, Homo sapien
ttcctcttcattttccgcagtaactgccagtgc

SEQ ID NO: 1064015 - DNA, 33 bp, Homo sapien
tctcaagcttctaaaacttgcctctgctgacat

SEQ ID NO: 1064016 - DNA, 33 bp, Homo sapien
tctcaagcttctaaaagttgcctctgctgacat

SEQ ID NO: 1064017 - DNA, 33 bp, Homo sapien
aaattgcttctagaggcatatagtctaatattc

SEQ ID NO: 1064018 - DNA, 33 bp, Homo sapien
aaattgcttctagaggtatatagtctaatattc

SEQ ID NO: 1064019 - DNA, 33 bp, Homo sapien
gcaagcagatgactacactcttttgatcatatt

SEQ ID NO: 1064020 - DNA, 33 bp, Homo sapien
gcaagcagatgactacgctcttttgatcatatt

SEQ ID NO: 1064021 - DNA, 33 bp, Homo sapien
atatcttacactcaaaagataaatgcttaggag

SEQ ID NO: 1064022 - DNA, 33 bp, Homo sapien
atatcttacactcaaaggataaatgcttaggag

SEQ ID NO: 1064023 - DNA, 33 bp, Homo sapien
tggtatctcatttttgaatctctctaataatca

SEQ ID NO: 1064024 - DNA, 33 bp, Homo sapien
tggtatctcatttttgcatctctctaataatca

SEQ ID NO: 1064025 - DNA, 33 bp, Homo sapien
cagattacatcctgagacctcttggtttgtagg

SEQ ID NO: 1064026 - DNA, 33 bp, Homo sapien
cagattacatcctgaggcctcttggtttgtagg

SEQ ID NO: 1064027 - DNA, 33 bp, Homo sapien
tctgcaattctggttccaatgagtgaaaaaaaa

SEQ ID NO: 1064028 - DNA, 33 bp, Homo sapien
tctgcaattctggttctaatgagtgaaaaaaaa

SEQ ID NO: 1064029 - DNA, 33 bp, Homo sapien
atcagtggagcagtcaatatacacacaacattt

SEQ ID NO: 1064030 - DNA, 33 bp, Homo sapien
atcagtggagcagtcagtatacacacaacattt

SEQ ID NO: 1064031 - DNA, 33 bp, Homo sapien
cacattttggtacttcccatgacatttcaaaca

SEQ ID NO: 1064032 - DNA, 33 bp, Homo sapien
cacattttggtacttctcatgacatttcaaaca

SEQ ID NO: 1064033 - DNA, 33 bp, Homo sapien
taggacttgactcatgaacagtaccactgaacc

SEQ ID NO: 1064034 - DNA, 33 bp, Homo sapien
taggacttgactcatggacagtaccactgaacc

SEQ ID NO: 1064035 - DNA, 33 bp, Homo sapien
tcttgaaataaggcaccaatgaggttgtcggag

SEQ ID NO: 1064036 - DNA, 33 bp, Homo sapien
tcttgaaataaggcactaatgaggttgtcggag

SEQ ID NO: 1064037 - DNA, 33 bp, Homo sapien
gtgactcactttattgaaatattcactgtattg

SEQ ID NO: 1064038 - DNA, 33 bp, Homo sapien
gtgactcactttattgcaatattcactgtattg

SEQ ID NO: 1064039 - DNA, 33 bp, Homo sapien
tggccaactaggaacaagtactgtgcatggctt

SEQ ID NO: 1064040 - DNA, 33 bp, Homo sapien
tggccaactaggaacaggtactgtgcatggctt

SEQ ID NO: 1064041 - DNA, 33 bp, Homo sapien
cattgtagttgaagaacgtcttgcactatcgaa

SEQ ID NO: 1064042 - DNA, 33 bp, Homo sapien
cattgtagttgaagaatgtcttgcactatcgaa

SEQ ID NO: 1064043 - DNA, 33 bp, Homo sapien
gaggcttccaaggttccaccctcatccttagac

SEQ ID NO: 1064044 - DNA, 33 bp, Homo sapien
gaggcttccaaggttctaccctcatccttagac

SEQ ID NO: 1064045 - DNA, 33 bp, Homo sapien
cacaataagacaaatacatcaacaagcataaaa

SEQ ID NO: 1064046 - DNA, 33 bp, Homo sapien
cacaataagacaaatatatcaacaagcataaaa

SEQ ID NO: 1064047 - DNA, 33 bp, Homo sapien
gaaaagacaatcaaccaactgaagaaaatattt

SEQ ID NO: 1064048 - DNA, 33 bp, Homo sapien
gaaaagacaatcaaccgactgaagaaaatattt

SEQ ID NO: 1064049 - DNA, 33 bp, Homo sapien
ttcagctaagtttcaaatgttaaactatggtag

SEQ ID NO: 1064050 - DNA, 33 bp, Homo sapien
ttcagctaagtttcaagtgttaaactatggtag

SEQ ID NO: 1064051 - DNA, 33 bp, Homo sapien
cctttccttgcataaactcacatggctaccaat

SEQ ID NO: 1064052 - DNA, 33 bp, Homo sapien
cctttccttgcataaattcacatggctaccaat

SEQ ID NO: 1064053 - DNA, 33 bp, Homo sapien
ctgagaagatggctgaaacttttgtcctatttc

SEQ ID NO: 1064054 - DNA, 33 bp, Homo sapien
ctgagaagatggctgacacttttgtcctatttc

SEQ ID NO: 1064055 - DNA, 33 bp, Homo sapien
aataattggtgtttccaagtaagaagagaaatc

SEQ ID NO: 1064056 - DNA, 33 bp, Homo sapien
aataattggtgtttcctagtaagaagagaaatc

SEQ ID NO: 1064057 - DNA, 33 bp, Homo sapien; identical to SEQ ID NO: 1064055

SEQ ID NO: 1064058 - DNA, 33 bp, Homo sapien; identical to SEQ ID NO: 1064056

SEQ ID NO: 1064059 - DNA, 33 bp, Homo sapien
tttgaaggtagttctaaaagaatttgttgatgg

SEQ ID NO: 1064060 - DNA, 33 bp, Homo sapien
tttgaaggtagttctagaagaatttgttgatgg

SEQ ID NO: 1064061 - DNA, 33 bp, Homo sapien
ctcgaaagaaatccaaatgaatatatcacccta

SEQ ID NO: 1064062 - DNA, 33 bp, Homo sapien
ctcgaaagaaatccaagtgaatatatcacccta

SEQ ID NO: 1064063 - DNA, 33 bp, Homo sapien
tgcttctgcttttccacgaactcctcctccatt

SEQ ID NO: 1064064 - DNA, 33 bp, Homo sapien
tgcttctgcttttccatgaactcctcctccatt

SEQ ID NO: 1064065 - DNA, 33 bp, Homo sapien; identical to SEQ ID NO: 1064063

SEQ ID NO: 1064066 - DNA, 33 bp, Homo sapien; identical to SEQ ID NO: 1064064

SEQ ID NO: 1064067 - DNA, 33 bp, Homo sapien
taacaaaattaatccactgacttaatcacctct

SEQ ID NO: 1064068 - DNA, 33 bp, Homo sapien
taacaaaattaatccattgacttaatcacctct

SEQ ID NO: 1064069 - DNA, 33 bp, Homo sapien
ctttgaccttttggaacacaaacccattcatct

SEQ ID NO: 1064070 - DNA, 33 bp, Homo sapien
ctttgaccttttggaatacaaacccattcatct

SEQ ID NO: 1064071 - DNA, 33 bp, Homo sapien
agactgcaacctagacaaaatgaaagtacagtc

SEQ ID NO: 1064072 - DNA, 33 bp, Homo sapien
agactgcaacctagacgaaatgaaagtacagtc

SEQ ID NO: 1064073 - DNA, 33 bp, Homo sapien
atacgataaaagtatgacaactataagtccctt

SEQ ID NO: 1064074 - DNA, 33 bp, Homo sapien
atacgataaaagtatggcaactataagtccctt

SEQ ID NO: 1064075 - DNA, 33 bp, Homo sapien
ggtaaatcgagtcaagacattattgttctggct

SEQ ID NO: 1064076 - DNA, 33 bp, Homo sapien
ggtaaatcgagtcaaggcattattgttctggct

SEQ ID NO: 1064077 - DNA, 33 bp, Homo sapien
aatgtgtactattttacagccagaacaataatg

SEQ ID NO: 1064078 - DNA, 33 bp, Homo sapien
aatgtgtactattttagagccagaacaataatg

SEQ ID NO: 1064079 - DNA, 33 bp, Homo sapien
aagttactgatttgaaaggttttctggatcttg

SEQ ID NO: 1064080 - DNA, 33 bp, Homo sapien
aagttactgatttgaacggttttctggatcttg

SEQ ID NO: 1064081 - DNA, 33 bp, Homo sapien
aatgaaatatcctgagaagaaagaaataaaatt

SEQ ID NO: 1064082 - DNA, 33 bp, Homo sapien
aatgaaatatcctgaggagaaagaaataaaatt

SEQ ID NO: 1064083 - DNA, 33 bp, Homo sapien
atcaactcttgagactaaaaaccatgtatctca

SEQ ID NO: 1064084 - DNA, 33 bp, Homo sapien
atcaactcttgagactcaaaaccatgtatctca

SEQ ID NO: 1064085 - DNA, 33 bp, Homo sapien
aacagctcattaaggacaattttacttttgtgg

SEQ ID NO: 1064086 - DNA, 33 bp, Homo sapien
aacagctcattaaggagaattttacttttgtgg

SEQ ID NO: 1064087 - DNA, 33 bp, Homo sapien
ggggtgtttgtgaaaccgaaatagtcactgaaa

SEQ ID NO: 1064088 - DNA, 33 bp, Homo sapien
ggggtgtttgtgaaactgaaatagtcactgaaa

SEQ ID NO: 1064089 - DNA, 33 bp, Homo sapien
gtaatacaggcaatgcaagttacaggaattcag

SEQ ID NO: 1064090 - DNA, 33 bp, Homo sapien
gtaatacaggcaatgcgagttacaggaattcag

SEQ ID NO: 1064091 - DNA, 33 bp, Homo sapien
atccctgagtggaaaaagtttctaaatctcatt

SEQ ID NO: 1064092 - DNA, 33 bp, Homo sapien
atccctgagtggaaaaggtttctaaatctcatt

SEQ ID NO: 1064093 - DNA, 33 bp, Homo sapien
atgtacattgaagaaaaactggaagaatataca

SEQ ID NO: 1064094 - DNA, 33 bp, Homo sapien
atgtacattgaagaaagactggaagaatataca

SEQ ID NO: 1064095 - DNA, 33 bp, Homo sapien
agctgaccggggcagaagtggttccctactaca

SEQ ID NO: 1064096 - DNA, 33 bp, Homo sapien
agctgaccggggcagacgtggttccctactaca

SEQ ID NO: 1064097 - DNA, 33 bp, Homo sapien
aaacccataaagatgaacaagaatcgacacaaa

SEQ ID NO: 1064098 - DNA, 33 bp, Homo sapien
aaacccataaagatgagcaagaatcgacacaaa

SEQ ID NO: 1064099 - DNA, 33 bp, Homo sapien
tgcaatcacttgaaggaaaaagagcactctggc

SEQ ID NO: 1064100 - DNA, 33 bp, Homo sapien
tgcaatcacttgaagggaaaagagcactctggc

SEQ ID NO: 1064101 - DNA, 33 bp, Homo sapien
atctttagctatttcaaacaatgctactcttta

SEQ ID NO: 1064102 - DNA, 33 bp, Homo sapien
atctttagctatttcagacaatgctactcttta

SEQ ID NO: 1064103 - DNA, 33 bp, Homo sapien
gtccaatgtcataaaaatagtgaactagtgtca

SEQ ID NO: 1064104 - DNA, 33 bp, Homo sapien
gtccaatgtcataaaattagtgaactagtgtca

SEQ ID NO: 1064105 - DNA, 33 bp, Homo sapien
aagactatcgactaatcaaagcactcctgcttc

SEQ ID NO: 1064106 - DNA, 33 bp, Homo sapien
aagactatcgactaattaaagcactcctgcttc

SEQ ID NO: 1064107 - DNA, 33 bp, Homo sapien
gattggttaaagtgtacagagatactgatatac

SEQ ID NO: 1064108 - DNA, 33 bp, Homo sapien
gattggttaaagtgtatagagatactgatatac

SEQ ID NO: 1064109 - DNA, 33 bp, Homo sapien
cagaagaaagaatcagcaagcctgaagacagac

SEQ ID NO: 1064110 - DNA, 33 bp, Homo sapien
cagaagaaagaatcagtaagcctgaagacagac

SEQ ID NO: 1064111 - DNA, 33 bp, Homo sapien
attcttcagttcagtacatgtatttcgcagctc

SEQ ID NO: 1064112 - DNA, 33 bp, Homo sapien
attcttcagttcagtatatgtatttcgcagctc

SEQ ID NO: 1064113 - DNA, 33 bp, Homo sapien
aaatcattatacagaaatcaataggctttacaa

SEQ ID NO: 1064114 - DNA, 33 bp, Homo sapien
aaatcattatacagaagtcaataggctttacaa

SEQ ID NO: 1064115 - DNA, 33 bp, Homo sapien
atgcatctttggcgggaataccagagaagtgtt

SEQ ID NO: 1064116 - DNA, 33 bp, Homo sapien
atgcatctttggcggggataccagagaagtgtt

SEQ ID NO: 1064117 - DNA, 33 bp, Homo sapien
gaaaggaggttgaagtaaagaatcagagggaga

SEQ ID NO: 1064118 - DNA, 33 bp, Homo sapien
gaaaggaggttgaagtcaagaatcagagggaga

SEQ ID NO: 1064119 - DNA, 33 bp, Homo sapien
gacttcgggaactgaccatacctatatttgagt

SEQ ID NO: 1064120 - DNA, 33 bp, Homo sapien
gacttcgggaactgactatacctatatttgagt

SEQ ID NO: 1064121 - DNA, 33 bp, Homo sapien
tatttgaggtcagaacaaagtttattccaaagc

SEQ ID NO: 1064122 - DNA, 33 bp, Homo sapien
tatttgaggtcagaacgaagtttattccaaagc

SEQ ID NO: 1064123 - DNA, 33 bp, Homo sapien
tcttctctggttctcaaatcaactgtcctcaca

SEQ ID NO: 1064124 - DNA, 33 bp, Homo sapien
tcttctctggttctcacatcaactgtcctcaca

SEQ ID NO: 1064125 - DNA, 33 bp, Homo sapien
gtgggagtgtggtggacgatgagaaattactca

SEQ ID NO: 1064126 - DNA, 33 bp, Homo sapien
gtgggagtgtggtggatgatgagaaattactca

SEQ ID NO: 1064127 - DNA, 33 bp, Homo sapien
tgtataaacataccaagtgaggacatttttgtg

SEQ ID NO: 1064128 - DNA, 33 bp, Homo sapien
tgtataaacataccaattgaggacatttttgtg

SEQ ID NO: 1064129 - DNA, 33 bp, Homo sapien
cctagcaaaacataccaacattcaaattcagga

SEQ ID NO: 1064130 - DNA, 33 bp, Homo sapien
cctagcaaaacataccgacattcaaattcagga

SEQ ID NO: 1064131 - DNA, 33 bp, Homo sapien
tacaccttctctatagccaaaggttagaagtta

SEQ ID NO: 1064132 - DNA, 33 bp, Homo sapien
tacaccttctctatagtcaaaggttagaagtta

SEQ ID NO: 1064133 - DNA, 33 bp, Homo sapien
gctctgtgctggccacactttcaacactcagcc

SEQ ID NO: 1064134 - DNA, 33 bp, Homo sapien
gctctgtgctggccacgctttcaacactcagcc

SEQ ID NO: 1064135 - DNA, 33 bp, Homo sapien
ggtgaaaataattcaaaatggaaagctaaaaca

SEQ ID NO: 1064136 - DNA, 33 bp, Homo sapien
ggtgaaaataattcaagatggaaagctaaaaca

SEQ ID NO: 1064137 - DNA, 33 bp, Homo sapien
cactataaattaaatgcatggtctccaacctca

SEQ ID NO: 1064138 - DNA, 33 bp, Homo sapien
cactataaattaaatgtatggtctccaacctca

SEQ ID NO: 1064139 - DNA, 33 bp, Homo sapien
gaaaggaggaggtaaggccttctgtgaagagtg

SEQ ID NO: 1064140 - DNA, 33 bp, Homo sapien
gaaaggaggaggtaagtccttctgtgaagagtg

SEQ ID NO: 1064141 - DNA, 33 bp, Homo sapien
atggtttttcaactgaacttttggcaggcagaa

SEQ ID NO: 1064142 - DNA, 33 bp, Homo sapien
atggtttttcaactgagcttttggcaggcagaa

SEQ ID NO: 1064143 - DNA, 33 bp, Homo sapien
gacatatttttccaccaaagactctaaaatttc

SEQ ID NO: 1064144 - DNA, 33 bp, Homo sapien
gacatatttttccaccgaagactctaaaatttc

SEQ ID NO: 1064145 - DNA, 33 bp, Homo sapien
agctggttctctgaaaaataaaagtgatagacc

SEQ ID NO: 1064146 - DNA, 33 bp, Homo sapien
agctggttctctgaaagataaaagtgatagacc

SEQ ID NO: 1064147 - DNA, 33 bp, Homo sapien
gatttgttgaggaaaaagctatgtcacattggt

SEQ ID NO: 1064148 - DNA, 33 bp, Homo sapien
gatttgttgaggaaaaggctatgtcacattggt

SEQ ID NO: 1064149 - DNA, 33 bp, Homo sapien
tttcacttaacatagcacaataaatatattttc

SEQ ID NO: 1064150 - DNA, 33 bp, Homo sapien
tttcacttaacatagcgcaataaatatattttc

SEQ ID NO: 1064151 - DNA, 33 bp, Homo sapien
caattgtcctaatacactccttatagcaaaaga

SEQ ID NO: 1064152 - DNA, 33 bp, Homo sapien
caattgtcctaatacagtccttatagcaaaaga

SEQ ID NO: 1064153 - DNA, 33 bp, Homo sapien
gatgcttttctactaccaagaccaatcataaat

SEQ ID NO: 1064154 - DNA, 33 bp, Homo sapien
gatgcttttctactacgaagaccaatcataaat

SEQ ID NO: 1064155 - DNA, 33 bp, Homo sapien
ctagggacttggataaactagggacaaatgtta

SEQ ID NO: 1064156 - DNA, 33 bp, Homo sapien
ctagggacttggataagctagggacaaatgtta

SEQ ID NO: 1064157 - DNA, 33 bp, Homo sapien
acagaatgttcagtaaacttcaccaaataacca

SEQ ID NO: 1064158 - DNA, 33 bp, Homo sapien
acagaatgttcagtaaccttcaccaaataacca

SEQ ID NO: 1064159 - DNA, 33 bp, Homo sapien
ttaacaagtatggatcagaatcaaaagaattga

SEQ ID NO: 1064160 - DNA, 33 bp, Homo sapien
ttaacaagtatggatcggaatcaaaagaattga

SEQ ID NO: 1064161 - DNA, 33 bp, Homo sapien
atatccaggttgctaaaaacagaaactaaacaa

SEQ ID NO: 1064162 - DNA, 33 bp, Homo sapien
atatccaggttgctaacaacagaaactaaacaa

SEQ ID NO: 1064163 - DNA, 33 bp, Homo sapien
aaattattattcagtacattatgagaccaggaa

SEQ ID NO: 1064164 - DNA, 33 bp, Homo sapien
aaattattattcagtatattatgagaccaggaa

SEQ ID NO: 1064165 - DNA, 33 bp, Homo sapien
caggattactgcagccaagttattactgctaga

SEQ ID NO: 1064166 - DNA, 33 bp, Homo sapien
caggattactgcagccgagttattactgctaga

SEQ ID NO: 1064167 - DNA, 33 bp, Homo sapien
ttccaatttacttcaaataagcgctggtcagaa

SEQ ID NO: 1064168 - DNA, 33 bp, Homo sapien
ttccaatttacttcaagtaagcgctggtcagaa

SEQ ID NO: 1064169 - DNA, 33 bp, Homo sapien
tttcatagtaagaaccacatatgatgagagact

SEQ ID NO: 1064170 - DNA, 33 bp, Homo sapien
tttcatagtaagaaccgcatatgatgagagact

SEQ ID NO: 1064171 - DNA, 33 bp, Homo sapien
ctttcagagtcagtgcagaattaggctttcctg

SEQ ID NO: 1064172 - DNA, 33 bp, Homo sapien
ctttcagagtcagtgcggaattaggctttcctg

SEQ ID NO: 1064173 - DNA, 33 bp, Homo sapien
tcttggattccggcaagctttggattattcata

SEQ ID NO: 1064174 - DNA, 33 bp, Homo sapien
tcttggattccggcaatctttggattattcata

SEQ ID NO: 1064175 - DNA, 33 bp, Homo sapien
aggggctacccaagaacatttatgaacatgttg

SEQ ID NO: 1064176 - DNA, 33 bp, Homo sapien
aggggctacccaagaatatttatgaacatgttg

SEQ ID NO: 1064177 - DNA, 33 bp, Homo sapien
atttctccctttgtaccctggcattttatatac

SEQ ID NO: 1064178 - DNA, 33 bp, Homo sapien
atttctccctttgtactctggcattttatatac

SEQ ID NO: 1064179 - DNA, 33 bp, Homo sapien
agtgcgattgtggtttcaaaagtgtaagagcac

SEQ ID NO: 1064180 - DNA, 33 bp, Homo sapien
agtgcgattgtggtttgaaaagtgtaagagcac

SEQ ID NO: 1064181 - DNA, 33 bp, Homo sapien
gcttcctaagtaggtaataaatgatagctctct

SEQ ID NO: 1064182 - DNA, 33 bp, Homo sapien
gcttcctaagtaggtactaaatgatagctctct

SEQ ID NO: 1064183 - DNA, 33 bp, Homo sapien
gacttctcagctttcacaaccaggtaaaccaat

SEQ ID NO: 1064184 - DNA, 33 bp, Homo sapien
gacttctcagctttcataaccaggtaaaccaat

SEQ ID NO: 1064185 - DNA, 33 bp, Homo sapien
aatcaatttaggtgtccattaatggtggcttgg

SEQ ID NO: 1064186 - DNA, 33 bp, Homo sapien
aatcaatttaggtgtctattaatggtggcttgg

SEQ ID NO: 1064187 - DNA, 33 bp, Homo sapien
catacacacacgtatacagtttaaccagtatat

SEQ ID NO: 1064188 - DNA, 33 bp, Homo sapien
catacacacacgtatatagtttaaccagtatat

SEQ ID NO: 1064189 - DNA, 33 bp, Homo sapien
gaagacaggaaacataagcaactctgctgtttg

SEQ ID NO: 1064190 - DNA, 33 bp, Homo sapien
gaagacaggaaacataggcaactctgctgtttg

SEQ ID NO: 1064191 - DNA, 33 bp, Homo sapien
cagattacttccctgaaaggcggtggcaattca

SEQ ID NO: 1064192 - DNA, 33 bp, Homo sapien
cagattacttccctgagaggcggtggcaattca

SEQ ID NO: 1064193 - DNA, 33 bp, Homo sapien
atttgcaatcaggttacaatcaagaaggcttgc

SEQ ID NO: 1064194 - DNA, 33 bp, Homo sapien
atttgcaatcaggttataatcaagaaggcttgc

SEQ ID NO: 1064195 - DNA, 33 bp, Homo sapien
accacatttttatcaacgaaacacactatgcca

SEQ ID NO: 1064196 - DNA, 33 bp, Homo sapien
accacatttttatcaatgaaacacactatgcca

SEQ ID NO: 1064197 - DNA, 33 bp, Homo sapien
ggtaagcttacaaagacggtaagtttacaaaac

SEQ ID NO: 1064198 - DNA, 33 bp, Homo sapien
ggtaagcttacaaagatggtaagtttacaaaac

SEQ ID NO: 1064199 - DNA, 33 bp, Homo sapien
agtggaccagtagaacaaacagatgtttcagag

SEQ ID NO: 1064200 - DNA, 33 bp, Homo sapien
agtggaccagtagaacgaacagatgtttcagag

SEQ ID NO: 1064201 - DNA, 33 bp, Homo sapien
caattaagcaattataaaatccactaatgtcaa

SEQ ID NO: 1064202 - DNA, 33 bp, Homo sapien
caattaagcaattatagaatccactaatgtcaa

SEQ ID NO: 1064203 - DNA, 33 bp, Homo sapien
ccatttcagcataaaagaaatgtggttgaaatt

SEQ ID NO: 1064204 - DNA, 33 bp, Homo sapien
ccatttcagcataaaataaatgtggttgaaatt

SEQ ID NO: 1064205 - DNA, 33 bp, Homo sapien
ctaactcttcatgataccaacacaatggctggt

SEQ ID NO: 1064206 - DNA, 33 bp, Homo sapien
ctaactcttcatgatatcaacacaatggctggt

SEQ ID NO: 1064207 - DNA, 33 bp, Homo sapien
ttcaggactccacttaaaagtatgttagactgc

SEQ ID NO: 1064208 - DNA, 33 bp, Homo sapien
ttcaggactccacttacaagtatgttagactgc

SEQ ID NO: 1064209 - DNA, 33 bp, Homo sapien
acaatctttctggaagacaatttgatattttct

SEQ ID NO: 1064210 - DNA, 33 bp, Homo sapien
acaatctttctggaaggcaatttgatattttct

SEQ ID NO: 1064211 - DNA, 33 bp, Homo sapien
gtgtcgaacgctttcacagaaatttgcacaagg

SEQ ID NO: 1064212 - DNA, 33 bp, Homo sapien
gtgtcgaacgctttcatagaaatttgcacaagg

SEQ ID NO: 1064213 - DNA, 33 bp, Homo sapien
ttccctgctcttttgacgaggctctttatatga

SEQ ID NO: 1064214 - DNA, 33 bp, Homo sapien
ttccctgctcttttgatgaggctctttatatga

SEQ ID NO: 1064215 - DNA, 33 bp, Homo sapien
acaggttcaaagaggaactcacatggtttatga

SEQ ID NO: 1064216 - DNA, 33 bp, Homo sapien
acaggttcaaagaggatctcacatggtttatga

SEQ ID NO: 1064217 - DNA, 33 bp, Homo sapien
cctagttcctctattgcatagctaactaaaaag

SEQ ID NO: 1064218 - DNA, 33 bp, Homo sapien
cctagttcctctattgtatagctaactaaaaag

SEQ ID NO: 1064219 - DNA, 33 bp, Homo sapien
aatagaaactgattatcactggtgggattataa

SEQ ID NO: 1064220 - DNA, 33 bp, Homo sapien
aatagaaactgattatgactggtgggattataa

SEQ ID NO: 1064221 - DNA, 33 bp, Homo sapien
gctgctaaaggcctccaatgttttaagagatgg

SEQ ID NO: 1064222 - DNA, 33 bp, Homo sapien
gctgctaaaggcctccgatgttttaagagatgg

SEQ ID NO: 1064223 - DNA, 33 bp, Homo sapien
aaacttgcttcggttagcaggtatcagagcttg

SEQ ID NO: 1064224 - DNA, 33 bp, Homo sapien
aaacttgcttcggttatcaggtatcagagcttg

SEQ ID NO: 1064225 - DNA, 33 bp, Homo sapien
gaagtgtcagtaagaacacagcttaaggataca

SEQ ID NO: 1064226 - DNA, 33 bp, Homo sapien
gaagtgtcagtaagaagacagcttaaggataca

SEQ ID NO: 1064227 - DNA, 33 bp, Homo sapien
gcaacagtctccttcacgtctccacttataccc

SEQ ID NO: 1064228 - DNA, 33 bp, Homo sapien
gcaacagtctccttcatgtctccacttataccc

SEQ ID NO: 1064229 - DNA, 33 bp, Homo sapien
caaggtgccaaagtggccaatgattttcaagaa

SEQ ID NO: 1064230 - DNA, 33 bp, Homo sapien
caaggtgccaaagtggtcaatgattttcaagaa

SEQ ID NO: 1064231 - DNA, 33 bp, Homo sapien
ttctatcaggttttcaagtaatgctgatgttgt

SEQ ID NO: 1064232 - DNA, 33 bp, Homo sapien
ttctatcaggttttcaggtaatgctgatgttgt

SEQ ID NO: 1064233 - DNA, 33 bp, Homo sapien
accatgctataggtgcaaggagacagctaactt

SEQ ID NO: 1064234 - DNA, 33 bp, Homo sapien
accatgctataggtgcgaggagacagctaactt

SEQ ID NO: 1064235 - DNA, 33 bp, Homo sapien
cccacaacaactctaaactagttcgggaacctg

SEQ ID NO: 1064236 - DNA, 33 bp, Homo sapien
cccacaacaactctaatctagttcgggaacctg

SEQ ID NO: 1064237 - DNA, 33 bp, Homo sapien
ataccttatgaatccactatactggagcgactg

SEQ ID NO: 1064238 - DNA, 33 bp, Homo sapien
ataccttatgaatccattatactggagcgactg

SEQ ID NO: 1064239 - DNA, 33 bp, Homo sapien
taattctgtagaagtacctggaaaggttgacta

SEQ ID NO: 1064240 - DNA, 33 bp, Homo sapien
taattctgtagaagtatctggaaaggttgacta

SEQ ID NO: 1064241 - DNA, 33 bp, Homo sapien
gagatagattaggaagacactacagaaatttag

SEQ ID NO: 1064242 - DNA, 33 bp, Homo sapien
gagatagattaggaagtcactacagaaatttag

SEQ ID NO: 1064243 - DNA, 33 bp, Homo sapien
tctaaatcagacgtcactaccacagtgctgaaa

SEQ ID NO: 1064244 - DNA, 33 bp, Homo sapien
tctaaatcagacgtcattaccacagtgctgaaa

SEQ ID NO: 1064245 - DNA, 33 bp, Homo sapien
aatctgtttgtgagtcccaagacttgaaagtaa

SEQ ID NO: 1064246 - DNA, 33 bp, Homo sapien
aatctgtttgtgagtctcaagacttgaaagtaa

SEQ ID NO: 1064247 - DNA, 33 bp, Homo sapien
taaatctgaatgctgaactatttaaacataaca

SEQ ID NO: 1064248 - DNA, 33 bp, Homo sapien
taaatctgaatgctgagctatttaaacataaca

SEQ ID NO: 1064249 - DNA, 33 bp, Homo sapien
atcagatactctttcaactcttttccaggtatg

SEQ ID NO: 1064250 - DNA, 33 bp, Homo sapien
atcagatactctttcagctcttttccaggtatg

SEQ ID NO: 1064251 - DNA, 33 bp, Homo sapien
ctcctaggtagcttcccgaataagtctatcaga

SEQ ID NO: 1064252 - DNA, 33 bp, Homo sapien
ctcctaggtagcttccggaataagtctatcaga

SEQ ID NO: 1064253 - DNA, 33 bp, Homo sapien
ccaaacagtcctttccaaacagataaacagaca

SEQ ID NO: 1064254 - DNA, 33 bp, Homo sapien
ccaaacagtcctttccgaacagataaacagaca

SEQ ID NO: 1064255 - DNA, 33 bp, Homo sapien
tttattcagatcgtgcaattttctttattttgg

SEQ ID NO: 1064256 - DNA, 33 bp, Homo sapien
tttattcagatcgtgccattttctttattttgg

SEQ ID NO: 1064257 - DNA, 33 bp, Homo sapien
tttgcgggggacataaacatagtccataattgg

SEQ ID NO: 1064258 - DNA, 33 bp, Homo sapien
tttgcgggggacataagcatagtccataattgg

SEQ ID NO: 1064259 - DNA, 33 bp, Homo sapien
tcccatctttgctcaaatatcacattctccaca

SEQ ID NO: 1064260 - DNA, 33 bp, Homo sapien
tcccatctttgctcaagtatcacattctccaca

SEQ ID NO: 1064261 - DNA, 33 bp, Homo sapien
tttaataacgttgtacaaaaatatatagagaaa

SEQ ID NO: 1064262 - DNA, 33 bp, Homo sapien
tttaataacgttgtacgaaaatatatagagaaa

SEQ ID NO: 1064263 - DNA, 33 bp, Homo sapien
caataaagtaaattgaaaaccatgagtcagaat

SEQ ID NO: 1064264 - DNA, 33 bp, Homo sapien
caataaagtaaattgacaaccatgagtcagaat

SEQ ID NO: 1064265 - DNA, 33 bp, Homo sapien
tctgtagtcacataccactttcatataatcctc

SEQ ID NO: 1064266 - DNA, 33 bp, Homo sapien
tctgtagtcacataccgctttcatataatcctc

SEQ ID NO: 1064267 - DNA, 33 bp, Homo sapien
aggaacattcttctcactcttcaaaataatacc

SEQ ID NO: 1064268 - DNA, 33 bp, Homo sapien
aggaacattcttctcagtcttcaaaataatacc

SEQ ID NO: 1064269 - DNA, 33 bp, Homo sapien
ctgaatatacttgatacgaatttgaattgttga

SEQ ID NO: 1064270 - DNA, 33 bp, Homo sapien
ctgaatatacttgatatgaatttgaattgttga

SEQ ID NO: 1064271 - DNA, 33 bp, Homo sapien
cctgagcatcataagaaatctacaaaatactgt

SEQ ID NO: 1064272 - DNA, 33 bp, Homo sapien
cctgagcatcataagacatctacaaaatactgt

SEQ ID NO: 1064273 - DNA, 33 bp, Homo sapien
tgctgaaggagtgccaaatagccactttggaaa

SEQ ID NO: 1064274 - DNA, 33 bp, Homo sapien
tgctgaaggagtgccagatagccactttggaaa

SEQ ID NO: 1064275 - DNA, 33 bp, Homo sapien
cccctgtaattcctccaatcaaatgagttcctt

SEQ ID NO: 1064276 - DNA, 33 bp, Homo sapien
cccctgtaattcctccgatcaaatgagttcctt

SEQ ID NO: 1064277 - DNA, 33 bp, Homo sapien
attcatagctaaatacaaaatcccaaactatta

SEQ ID NO: 1064278 - DNA, 33 bp, Homo sapien
attcatagctaaatacgaaatcccaaactatta

SEQ ID NO: 1064279 - DNA, 33 bp, Homo sapien
atttgttaagttggaacgtaaagtttggagaca

SEQ ID NO: 1064280 - DNA, 33 bp, Homo sapien
atttgttaagttggaatgtaaagtttggagaca

SEQ ID NO: 1064281 - DNA, 33 bp, Homo sapien
actatctttagtgccaggataataggattacat

SEQ ID NO: 1064282 - DNA, 33 bp, Homo sapien
actatctttagtgccatgataataggattacat

SEQ ID NO: 1064283 - DNA, 33 bp, Homo sapien
cagtgggaaattgtaacattgctgtataaaact

SEQ ID NO: 1064284 - DNA, 33 bp, Homo sapien
cagtgggaaattgtaatattgctgtataaaact

SEQ ID NO: 1064285 - DNA, 33 bp, Homo sapien
cattcataaggaagtcacagtcttttatagcct

SEQ ID NO: 1064286 - DNA, 33 bp, Homo sapien
cattcataaggaagtcccagtcttttatagcct

SEQ ID NO: 1064287 - DNA, 33 bp, Homo sapien
acattgaaattcatcactgatatctttgtagag

SEQ ID NO: 1064288 - DNA, 33 bp, Homo sapien
acattgaaattcatcattgatatctttgtagag

SEQ ID NO: 1064289 - DNA, 33 bp, Homo sapien
ctctgctttcctcaagcaaaactagtgtctccc

SEQ ID NO: 1064290 - DNA, 33 bp, Homo sapien
ctctgctttcctcaagtaaaactagtgtctccc

SEQ ID NO: 1064291 - DNA, 33 bp, Homo sapien
attagttagcataagaagttttagcatttgcat

SEQ ID NO: 1064292 - DNA, 33 bp, Homo sapien
attagttagcataagatgttttagcatttgcat

SEQ ID NO: 1064293 - DNA, 33 bp, Homo sapien
tgatgaacggataaacaatctgtggtatatcat

SEQ ID NO: 1064294 - DNA, 33 bp, Homo sapien
tgatgaacggataaaccatctgtggtatatcat

SEQ ID NO: 1064295 - DNA, 33 bp, Homo sapien
aggctaatttagcaaacgcccatctaccagcca

SEQ ID NO: 1064296 - DNA, 33 bp, Homo sapien
aggctaatttagcaaatgcccatctaccagcca

SEQ ID NO: 1064297 - DNA, 33 bp, Homo sapien
attataagaaccacccaatgtcctttattgaat

SEQ ID NO: 1064298 - DNA, 33 bp, Homo sapien
attataagaaccaccccatgtcctttattgaat

SEQ ID NO: 1064299 - DNA, 33 bp, Homo sapien
tgaagccattaggagacgctgataaggtgtagg

SEQ ID NO: 1064300 - DNA, 33 bp, Homo sapien
tgaagccattaggagatgctgataaggtgtagg

SEQ ID NO: 1064301 - DNA, 33 bp, Homo sapien
aatgatttgaaactctaacatttaacattcaga

SEQ ID NO: 1064302 - DNA, 33 bp, Homo sapien
aatgatttgaaactctgacatttaacattcaga

SEQ ID NO: 1064303 - DNA, 33 bp, Homo sapien
tccatgttttgtattaacctacaatgtttggcc

SEQ ID NO: 1064304 - DNA, 33 bp, Homo sapien
tccatgttttgtattagcctacaatgtttggcc

SEQ ID NO: 1064305 - DNA, 33 bp, Homo sapien
ctgaaactcaacatagaaccttgaaaactattg

SEQ ID NO: 1064306 - DNA, 33 bp, Homo sapien
ctgaaactcaacataggaccttgaaaactattg

SEQ ID NO: 1064307 - DNA, 33 bp, Homo sapien
cttacagccctcaaaaatatatcaggagtaaac

SEQ ID NO: 1064308 - DNA, 33 bp, Homo sapien
cttacagccctcaaaactatatcaggagtaaac

SEQ ID NO: 1064309 - DNA, 33 bp, Homo sapien
atgaaaactctttcccacaaatagctccacaga

SEQ ID NO: 1064310 - DNA, 33 bp, Homo sapien
atgaaaactctttcccgcaaatagctccacaga

SEQ ID NO: 1064311 - DNA, 33 bp, Homo sapien
caaatttcagctttcaaaaagtgtacgagaaag

SEQ ID NO: 1064312 - DNA, 33 bp, Homo sapien
caaatttcagctttcataaagtgtacgagaaag

SEQ ID NO: 1064313 - DNA, 33 bp, Homo sapien
tagtcaagcaaattaaaagtttcacacttgtta

SEQ ID NO: 1064314 - DNA, 33 bp, Homo sapien
tagtcaagcaaattaacagtttcacacttgtta

SEQ ID NO: 1064315 - DNA, 33 bp, Homo sapien
attgctctatagcccacaaaagttggagtttag

SEQ ID NO: 1064316 - DNA, 33 bp, Homo sapien
attgctctatagcccagaaaagttggagtttag

SEQ ID NO: 1064317 - DNA, 33 bp, Homo sapien
aaatactgctttgttcgaaaacttcagtaaact

SEQ ID NO: 1064318 - DNA, 33 bp, Homo sapien
aaatactgctttgttctaaaacttcagtaaact

SEQ ID NO: 1064319 - DNA, 33 bp, Homo sapien
gtgtgcattgtgacataagtagtggatgaggga

SEQ ID NO: 1064320 - DNA, 33 bp, Homo sapien
gtgtgcattgtgacatgagtagtggatgaggga

SEQ ID NO: 1064321 - DNA, 33 bp, Homo sapien
agatctggttgataacagaaacccagatcacct

SEQ ID NO: 1064322 - DNA, 33 bp, Homo sapien
agatctggttgataacggaaacccagatcacct

SEQ ID NO: 1064323 - DNA, 33 bp, Homo sapien
gggcaagagcaaaggcagagattgtcaacacat

SEQ ID NO: 1064324 - DNA, 33 bp, Homo sapien
gggcaagagcaaaggcggagattgtcaacacat

SEQ ID NO: 1064325 - DNA, 33 bp, Homo sapien
gacaaaggattgattacaaagagtgccaaaatt

SEQ ID NO: 1064326 - DNA, 33 bp, Homo sapien
gacaaaggattgattagaaagagtgccaaaatt

SEQ ID NO: 1064327 - DNA, 33 bp, Homo sapien
cagtaccttgtttaatcaagtagatgtgttatg

SEQ ID NO: 1064328 - DNA, 33 bp, Homo sapien
cagtaccttgtttaattaagtagatgtgttatg

SEQ ID NO: 1064329 - DNA, 33 bp, Homo sapien
tgagtctccttacaacaattctttgcatccttc

SEQ ID NO: 1064330 - DNA, 33 bp, Homo sapien
tgagtctccttacaacgattctttgcatccttc

SEQ ID NO: 1064331 - DNA, 33 bp, Homo sapien
caatttattggcactgaatggaaatattggaaa

SEQ ID NO: 1064332 - DNA, 33 bp, Homo sapien
caatttattggcactggatggaaatattggaaa

SEQ ID NO: 1064333 - DNA, 33 bp, Homo sapien
tgttcaaagtgtttcacagcgttttattgcaca

SEQ ID NO: 1064334 - DNA, 33 bp, Homo sapien
tgttcaaagtgtttcatagcgttttattgcaca

SEQ ID NO: 1064335 - DNA, 33 bp, Homo sapien
taatgctcaaatttggaaaatcctggttatcta

SEQ ID NO: 1064336 - DNA, 33 bp, Homo sapien
taatgctcaaatttgggaaatcctggttatcta

SEQ ID NO: 1064337 - DNA, 33 bp, Homo sapien
atctgtcaaaaatgacacgataattctttgagt

SEQ ID NO: 1064338 - DNA, 33 bp, Homo sapien
atctgtcaaaaatgacgcgataattctttgagt

SEQ ID NO: 1064339 - DNA, 33 bp, Homo sapien
tgtgctgaaaaatgacagtaaaaaatagtcctt

SEQ ID NO: 1064340 - DNA, 33 bp, Homo sapien
tgtgctgaaaaatgacggtaaaaaatagtcctt

SEQ ID NO: 1064341 - DNA, 33 bp, Homo sapien
cgtgtcatatatttcaagtgccccattttaaat

SEQ ID NO: 1064342 - DNA, 33 bp, Homo sapien
cgtgtcatatatttcaggtgccccattttaaat

SEQ ID NO: 1064343 - DNA, 33 bp, Homo sapien
catccataaattaagaccaacgaactggaatgt

SEQ ID NO: 1064344 - DNA, 33 bp, Homo sapien
catccataaattaagagcaacgaactggaatgt

SEQ ID NO: 1064345 - DNA, 33 bp, Homo sapien
acagttcttgaaaagccgcttccataccatact

SEQ ID NO: 1064346 - DNA, 33 bp, Homo sapien
acagttcttgaaaagctgcttccataccatact

SEQ ID NO: 1064347 - DNA, 33 bp, Homo sapien
gacctggttgcttcaacaataaaaactgggctg

SEQ ID NO: 1064348 - DNA, 33 bp, Homo sapien
gacctggttgcttcaataataaaaactgggctg

SEQ ID NO: 1064349 - DNA, 33 bp, Homo sapien
tatcatgatgagattaataaccaccacatttgg

SEQ ID NO: 1064350 - DNA, 33 bp, Homo sapien
tatcatgatgagattagtaaccaccacatttgg

SEQ ID NO: 1064351 - DNA, 33 bp, Homo sapien
tgaaggaagttctgtaaccaattcctcatggat

SEQ ID NO: 1064352 - DNA, 33 bp, Homo sapien
tgaaggaagttctgtagccaattcctcatggat

SEQ ID NO: 1064353 - DNA, 33 bp, Homo sapien
ctctttttctctagcacgagaatccaaaaagta

SEQ ID NO: 1064354 - DNA, 33 bp, Homo sapien
ctctttttctctagcatgagaatccaaaaagta

SEQ ID NO: 1064355 - DNA, 33 bp, Homo sapien
tccagttgtaacttaccaatccttctattctta

SEQ ID NO: 1064356 - DNA, 33 bp, Homo sapien
tccagttgtaacttactaatccttctattctta

SEQ ID NO: 1064357 - DNA, 33 bp, Homo sapien
tttttgttaggaaacacgtctgacaagactcca

SEQ ID NO: 1064358 - DNA, 33 bp, Homo sapien
tttttgttaggaaacaggtctgacaagactcca

SEQ ID NO: 1064359 - DNA, 33 bp, Homo sapien
ttgaagtcttaaaatactatctcttcttgttga

SEQ ID NO: 1064360 - DNA, 33 bp, Homo sapien
ttgaagtcttaaaatagtatctcttcttgttga

SEQ ID NO: 1064361 - DNA, 33 bp, Homo sapien
cttaattgcttgtgtacaatttcgtataatttt

SEQ ID NO: 1064362 - DNA, 33 bp, Homo sapien
cttaattgcttgtgtataatttcgtataatttt

SEQ ID NO: 1064363 - DNA, 33 bp, Homo sapien
taaagccaattcataacacttggtctgctggca

SEQ ID NO: 1064364 - DNA, 33 bp, Homo sapien
taaagccaattcataatacttggtctgctggca

SEQ ID NO: 1064365 - DNA, 33 bp, Homo sapien
taaatggatgatgaacaacttaacagaggagat

SEQ ID NO: 1064366 - DNA, 33 bp, Homo sapien
taaatggatgatgaactacttaacagaggagat

SEQ ID NO: 1064367 - DNA, 33 bp, Homo sapien
ctcctctataagaaaaaaggactgttgccacag

SEQ ID NO: 1064368 - DNA, 33 bp, Homo sapien
ctcctctataagaaaagaggactgttgccacag

SEQ ID NO: 1064369 - DNA, 33 bp, Homo sapien
cagactccctactgaaaaaatgatgctgggaaa

SEQ ID NO: 1064370 - DNA, 33 bp, Homo sapien
cagactccctactgaataaatgatgctgggaaa

SEQ ID NO: 1064371 - DNA, 33 bp, Homo sapien; identical to SEQ ID NO: 1064369

SEQ ID NO: 1064372 - DNA, 33 bp, Homo sapien; identical to SEQ ID NO: 1064370

SEQ ID NO: 1064373 - DNA, 33 bp, Homo sapien
cactgtctgagataagcaaaactgtggaaaaag

SEQ ID NO: 1064374 - DNA, 33 bp, Homo sapien
cactgtctgagataagtaaaactgtggaaaaag

SEQ ID NO: 1064375 - DNA, 33 bp, Homo sapien
tttgagtgattctcacaactcatcctcctgagt

SEQ ID NO: 1064376 - DNA, 33 bp, Homo sapien
tttgagtgattctcacgactcatcctcctgagt

SEQ ID NO: 1064377 - DNA, 33 bp, Homo sapien
ttggtgccaaaagacaatgctttgggataaatt

SEQ ID NO: 1064378 - DNA, 33 bp, Homo sapien
ttggtgccaaaagacattgctttgggataaatt

SEQ ID NO: 1064379 - DNA, 33 bp, Homo sapien
tgatacttgtctgaacacaaagcttcttggtaa

SEQ ID NO: 1064380 - DNA, 33 bp, Homo sapien
tgatacttgtctgaacgcaaagcttcttggtaa

SEQ ID NO: 1064381 - DNA, 33 bp, Homo sapien
caactttccttccctacgatttcatttgtagga

SEQ ID NO: 1064382 - DNA, 33 bp, Homo sapien
caactttccttccctatgatttcatttgtagga

SEQ ID NO: 1064383 - DNA, 33 bp, Homo sapien
tgttgttccctgtttaagtgtcagagtcaagtc

SEQ ID NO: 1064384 - DNA, 33 bp, Homo sapien
tgttgttccctgtttaggtgtcagagtcaagtc

SEQ ID NO: 1064385 - DNA, 33 bp, Homo sapien
acagacagattcactcactggttcagcaataga

SEQ ID NO: 1064386 - DNA, 33 bp, Homo sapien
acagacagattcactcgctggttcagcaataga

SEQ ID NO: 1064387 - DNA, 33 bp, Homo sapien
ctttaaacaacaaaccaaaggaaggtgaaaatg

SEQ ID NO: 1064388 - DNA, 33 bp, Homo sapien
ctttaaacaacaaaccgaaggaaggtgaaaatg

SEQ ID NO: 1064389 - DNA, 33 bp, Homo sapien
tgccatgccacttagacgagtgtaggggtcaag

SEQ ID NO: 1064390 - DNA, 33 bp, Homo sapien
tgccatgccacttagatgagtgtaggggtcaag

SEQ ID NO: 1064391 - DNA, 33 bp, Homo sapien
tctgtaagcttgatgaaaaattgatgaatagag

SEQ ID NO: 1064392 - DNA, 33 bp, Homo sapien
tctgtaagcttgatgagaaattgatgaatagag

SEQ ID NO: 1064393 - DNA, 33 bp, Homo sapien
tggtgcataagaaacagccaatataccctgtac

SEQ ID NO: 1064394 - DNA, 33 bp, Homo sapien
tggtgcataagaaacatccaatataccctgtac

SEQ ID NO: 1064395 - DNA, 33 bp, Homo sapien
tgatgaaggcgccatcaaacagtgccttatcta

SEQ ID NO: 1064396 - DNA, 33 bp, Homo sapien
tgatgaaggcgccatccaacagtgccttatcta

SEQ ID NO: 1064397 - DNA, 33 bp, Homo sapien
ctttcttctgaggcccacttagctctgaaacaa

SEQ ID NO: 1064398 - DNA, 33 bp, Homo sapien
ctttcttctgaggcccgcttagctctgaaacaa

SEQ ID NO: 1064399 - DNA, 33 bp, Homo sapien
gttcagttcagaagacgggagagaaggagaaag

SEQ ID NO: 1064400 - DNA, 33 bp, Homo sapien
gttcagttcagaagactggagagaaggagaaag

SEQ ID NO: 1064401 - DNA, 33 bp, Homo sapien
aaatgtaaacctttacagccgttttgtatttaa

SEQ ID NO: 1064402 - DNA, 33 bp, Homo sapien
aaatgtaaacctttactgccgttttgtatttaa

SEQ ID NO: 1064403 - DNA, 33 bp, Homo sapien
gtttcctcagaacttccccaagaggagctttcc

SEQ ID NO: 1064404 - DNA, 33 bp, Homo sapien
gtttcctcagaacttctccaagaggagctttcc

SEQ ID NO: 1064405 - DNA, 33 bp, Homo sapien
aagaagaaatataaaaatccaagtagccacatc

SEQ ID NO: 1064406 - DNA, 33 bp, Homo sapien
aagaagaaatataaaagtccaagtagccacatc

SEQ ID NO: 1064407 - DNA, 33 bp, Homo sapien
actagagagtaacttgaattcacatgaagaaat

SEQ ID NO: 1064408 - DNA, 33 bp, Homo sapien
actagagagtaacttgtattcacatgaagaaat

SEQ ID NO: 1064409 - DNA, 33 bp, Homo sapien
agctattaacacctgcaacaatatgggtgaatc

SEQ ID NO: 1064410 - DNA, 33 bp, Homo sapien
agctattaacacctgccacaatatgggtgaatc

SEQ ID NO: 1064411 - DNA, 33 bp, Homo sapien
ctagagtatcttgcaacaggtgtgttacttcaa

SEQ ID NO: 1064412 - DNA, 33 bp, Homo sapien
ctagagtatcttgcaagaggtgtgttacttcaa

SEQ ID NO: 1064413 - DNA, 33 bp, Homo sapien
agagacgtcttcttaaataaaagccactgaaca

SEQ ID NO: 1064414 - DNA, 33 bp, Homo sapien
agagacgtcttcttaagtaaaagccactgaaca

SEQ ID NO: 1064415 - DNA, 33 bp, Homo sapien
tcttattcacagtacacgagtaaggctataaat

SEQ ID NO: 1064416 - DNA, 33 bp, Homo sapien
tcttattcacagtacatgagtaaggctataaat

SEQ ID NO: 1064417 - DNA, 33 bp, Homo sapien
agagtgggaactaaaccgtattctgccttcagc

SEQ ID NO: 1064418 - DNA, 33 bp, Homo sapien
agagtgggaactaaactgtattctgccttcagc

SEQ ID NO: 1064419 - DNA, 33 bp, Homo sapien
gggtatattcagaagcaatgattagtgacactg

SEQ ID NO: 1064420 - DNA, 33 bp, Homo sapien
gggtatattcagaagccatgattagtgacactg

SEQ ID NO: 1064421 - DNA, 33 bp, Homo sapien
gtagagctttggttcaataccatttctgtctgg

SEQ ID NO: 1064422 - DNA, 33 bp, Homo sapien
gtagagctttggttcagtaccatttctgtctgg

SEQ ID NO: 1064423 - DNA, 33 bp, Homo sapien
gacccagctccataccaccaagaaactccaaca

SEQ ID NO: 1064424 - DNA, 33 bp, Homo sapien
gacccagctccataccgccaagaaactccaaca

SEQ ID NO: 1064425 - DNA, 33 bp, Homo sapien
gaaattgcttgtgttaactaactctgtccagaa

SEQ ID NO: 1064426 - DNA, 33 bp, Homo sapien
gaaattgcttgtgttatctaactctgtccagaa

SEQ ID NO: 1064427 - DNA, 33 bp, Homo sapien
taaactctgcctcaccaaagtagggcactgcat

SEQ ID NO: 1064428 - DNA, 33 bp, Homo sapien
taaactctgcctcaccgaagtagggcactgcat

SEQ ID NO: 1064429 - DNA, 33 bp, Homo sapien
tgacacagatatgtgcaaaaagtgtaaaagtat

SEQ ID NO: 1064430 - DNA, 33 bp, Homo sapien
tgacacagatatgtgcgaaaagtgtaaaagtat

SEQ ID NO: 1064431 - DNA, 33 bp, Homo sapien
caagacgatctctctaacctctttcatgtctct

SEQ ID NO: 1064432 - DNA, 33 bp, Homo sapien
caagacgatctctctatcctctttcatgtctct

SEQ ID NO: 1064433 - DNA, 33 bp, Homo sapien
cactttacctaaaacaatgagattaagcaacca

SEQ ID NO: 1064434 - DNA, 33 bp, Homo sapien
cactttacctaaaacagtgagattaagcaacca

SEQ ID NO: 1064435 - DNA, 33 bp, Homo sapien
ataaggctttcacttaagaacttcataccatat

SEQ ID NO: 1064436 - DNA, 33 bp, Homo sapien
ataaggctttcacttaggaacttcataccatat

SEQ ID NO: 1064437 - DNA, 33 bp, Homo sapien
gaattatttgatagaaattagacaagaatataa

SEQ ID NO: 1064438 - DNA, 33 bp, Homo sapien
gaattatttgatagaagttagacaagaatataa

SEQ ID NO: 1064439 - DNA, 33 bp, Homo sapien
catgctatgataaagacgcattgtttaattctt

SEQ ID NO: 1064440 - DNA, 33 bp, Homo sapien
catgctatgataaagatgcattgtttaattctt

SEQ ID NO: 1064441 - DNA, 33 bp, Homo sapien
tagtatcctggtatgaataatcgggatgcttga

SEQ ID NO: 1064442 - DNA, 33 bp, Homo sapien
tagtatcctggtatgactaatcgggatgcttga

SEQ ID NO: 1064443 - DNA, 33 bp, Homo sapien
atttggtactaaagaccgtagattagacttttc

SEQ ID NO: 1064444 - DNA, 33 bp, Homo sapien
atttggtactaaagactgtagattagacttttc

SEQ ID NO: 1064445 - DNA, 33 bp, Homo sapien
tttttcccaatctgtcaaaggtttccttaagaa

SEQ ID NO: 1064446 - DNA, 33 bp, Homo sapien
tttttcccaatctgtcgaaggtttccttaagaa

SEQ ID NO: 1064447 - DNA, 33 bp, Homo sapien
atatgtgataaagccacatattctagttaagcc

SEQ ID NO: 1064448 - DNA, 33 bp, Homo sapien
atatgtgataaagccagatattctagttaagcc

SEQ ID NO: 1064449 - DNA, 33 bp, Homo sapien
ccacttttcagcttcaaaataacaggctcaata

SEQ ID NO: 1064450 - DNA, 33 bp, Homo sapien
ccacttttcagcttcagaataacaggctcaata

SEQ ID NO: 1064451 - DNA, 33 bp, Homo sapien
ctggacagaacttggcacacttaattgagtatg

SEQ ID NO: 1064452 - DNA, 33 bp, Homo sapien
ctggacagaacttggcgcacttaattgagtatg

SEQ ID NO: 1064453 - DNA, 33 bp, Homo sapien
tgtgacttgagcagaacgataaacaagaacgtt

SEQ ID NO: 1064454 - DNA, 33 bp, Homo sapien
tgtgacttgagcagaatgataaacaagaacgtt

SEQ ID NO: 1064455 - DNA, 33 bp, Homo sapien
acaattttttacatcaaatgatctagtaaatca

SEQ ID NO: 1064456 - DNA, 33 bp, Homo sapien
acaattttttacatcacatgatctagtaaatca

SEQ ID NO: 1064457 - DNA, 33 bp, Homo sapien
acacaaccagttaagaagttctatactgttcta

SEQ ID NO: 1064458 - DNA, 33 bp, Homo sapien
acacaaccagttaagacgttctatactgttcta

SEQ ID NO: 1064459 - DNA, 33 bp, Homo sapien
tttgatacaattcataaaaccaagaaagtaaaa

SEQ ID NO: 1064460 - DNA, 33 bp, Homo sapien
tttgatacaattcatacaaccaagaaagtaaaa

SEQ ID NO: 1064461 - DNA, 33 bp, Homo sapien
acatcattctgccttcaagatcctaattcctcg

SEQ ID NO: 1064462 - DNA, 33 bp, Homo sapien
acatcattctgccttcgagatcctaattcctcg

SEQ ID NO: 1064463 - DNA, 33 bp, Homo sapien
aaacaaggtaagaaaacggaattgcagagagtt

SEQ ID NO: 1064464 - DNA, 33 bp, Homo sapien
aaacaaggtaagaaaatggaattgcagagagtt

SEQ ID NO: 1064465 - DNA, 33 bp, Homo sapien
ctttctctataaaatccgagacatagggcagtg

SEQ ID NO: 1064466 - DNA, 33 bp, Homo sapien
ctttctctataaaatctgagacatagggcagtg

SEQ ID NO: 1064467 - DNA, 33 bp, Homo sapien
aaagacaggcaattacaaacgttgtcaaggata

SEQ ID NO: 1064468 - DNA, 33 bp, Homo sapien
aaagacaggcaattacgaacgttgtcaaggata

SEQ ID NO: 1064469 - DNA, 33 bp, Homo sapien
ttaaaagttagtatgaataaaccaatgcttatt

SEQ ID NO: 1064470 - DNA, 33 bp, Homo sapien
ttaaaagttagtatgagtaaaccaatgcttatt

SEQ ID NO: 1064471 - DNA, 33 bp, Homo sapien
tattttgggcaggaacactatgcggctaatctt

SEQ ID NO: 1064472 - DNA, 33 bp, Homo sapien
tattttgggcaggaactctatgcggctaatctt

SEQ ID NO: 1064473 - DNA, 33 bp, Homo sapien
ataactacttcagccaataatttgaaagacttc

SEQ ID NO: 1064474 - DNA, 33 bp, Homo sapien
ataactacttcagccagtaatttgaaagacttc

SEQ ID NO: 1064475 - DNA, 33 bp, Homo sapien
ataattgttatgacaacggtagaaggccaatct

SEQ ID NO: 1064476 - DNA, 33 bp, Homo sapien
ataattgttatgacaatggtagaaggccaatct

SEQ ID NO: 1064477 - DNA, 33 bp, Homo sapien
ccacttgtgtgatgaactcaaaggtgcaaatgt

SEQ ID NO: 1064478 - DNA, 33 bp, Homo sapien
ccacttgtgtgatgaagtcaaaggtgcaaatgt

SEQ ID NO: 1064479 - DNA, 33 bp, Homo sapien
tggtgactacagcaacaatgtgttgtatacttc

SEQ ID NO: 1064480 - DNA, 33 bp, Homo sapien
tggtgactacagcaacgatgtgttgtatacttc

SEQ ID NO: 1064481 - DNA, 33 bp, Homo sapien
aagttctctctccagccatgtgacacgagacag

SEQ ID NO: 1064482 - DNA, 33 bp, Homo sapien
aagttctctctccagctatgtgacacgagacag

SEQ ID NO: 1064483 - DNA, 33 bp, Homo sapien
tccttcctcatctatcacccaattctaacagct

SEQ ID NO: 1064484 - DNA, 33 bp, Homo sapien
tccttcctcatctatcgcccaattctaacagct

SEQ ID NO: 1064485 - DNA, 33 bp, Homo sapien
tgagaatttgtagatacgtgaagggatatatgc

SEQ ID NO: 1064486 - DNA, 33 bp, Homo sapien
tgagaatttgtagatatgtgaagggatatatgc

SEQ ID NO: 1064487 - DNA, 33 bp, Homo sapien
attacttggcatcttacaagctaatcgacttgc

SEQ ID NO: 1064488 - DNA, 33 bp, Homo sapien
attacttggcatcttataagctaatcgacttgc

SEQ ID NO: 1064489 - DNA, 33 bp, Homo sapien
ctaatgctttctttagcaaggaattgatatcta

SEQ ID NO: 1064490 - DNA, 33 bp, Homo sapien
ctaatgctttctttaggaaggaattgatatcta

SEQ ID NO: 1064491 - DNA, 33 bp, Homo sapien
cctggatattaaatacaccttcatatgtttggg

SEQ ID NO: 1064492 - DNA, 33 bp, Homo sapien
cctggatattaaatactccttcatatgtttggg

SEQ ID NO: 1064493 - DNA, 33 bp, Homo sapien
aaaccctctatgacctaagccaatcttaataca

SEQ ID NO: 1064494 - DNA, 33 bp, Homo sapien
aaaccctctatgacctgagccaatcttaataca

SEQ ID NO: 1064495 - DNA, 33 bp, Homo sapien
ttttaatccctacgtacgcaatctaataattta

SEQ ID NO: 1064496 - DNA, 33 bp, Homo sapien
ttttaatccctacgtatgcaatctaataattta

SEQ ID NO: 1064497 - DNA, 33 bp, Homo sapien
ggtacataacatgaaaaaatttgatgcggccag

SEQ ID NO: 1064498 - DNA, 33 bp, Homo sapien
ggtacataacatgaaacaatttgatgcggccag

SEQ ID NO: 1064499 - DNA, 33 bp, Homo sapien
tattgaccacattatcaaatatgaaagttttta

SEQ ID NO: 1064500 - DNA, 33 bp, Homo sapien
tattgaccacattatcgaatatgaaagttttta

SEQ ID NO: 1064501 - DNA, 33 bp, Homo sapien
tgtagtgaattttggcaatccattagcatccct

SEQ ID NO: 1064502 - DNA, 33 bp, Homo sapien
tgtagtgaattttggcgatccattagcatccct

SEQ ID NO: 1064503 - DNA, 33 bp, Homo sapien
ccctatcagaatatgcaagatcaggtcactctt

SEQ ID NO: 1064504 - DNA, 33 bp, Homo sapien
ccctatcagaatatgcgagatcaggtcactctt

SEQ ID NO: 1064505 - DNA, 33 bp, Homo sapien
tgagaaactgacatataagtaaaaacccaaagg

SEQ ID NO: 1064506 - DNA, 33 bp, Homo sapien
tgagaaactgacatatgagtaaaaacccaaagg

SEQ ID NO: 1064507 - DNA, 33 bp, Homo sapien
tttatggcattcagtaaattaacagaagcaaga

SEQ ID NO: 1064508 - DNA, 33 bp, Homo sapien
tttatggcattcagtacattaacagaagcaaga

SEQ ID NO: 1064509 - DNA, 33 bp, Homo sapien
atcttttgcgttggaacctgcttcgtaatacta

SEQ ID NO: 1064510 - DNA, 33 bp, Homo sapien
atcttttgcgttggaagctgcttcgtaatacta

SEQ ID NO: 1064511 - DNA, 33 bp, Homo sapien
tgtacagcatgagttaaatgtagccttttgaag

SEQ ID NO: 1064512 - DNA, 33 bp, Homo sapien
tgtacagcatgagttatatgtagccttttgaag

SEQ ID NO: 1064513 - DNA, 33 bp, Homo sapien
tcaagaagcattttaaaaagttgtggaggataa

SEQ ID NO: 1064514 - DNA, 33 bp, Homo sapien
tcaagaagcattttaataagttgtggaggataa

SEQ ID NO: 1064515 - DNA, 33 bp, Homo sapien
taagcagctaactcagaagaatagtatttttag

SEQ ID NO: 1064516 - DNA, 33 bp, Homo sapien
taagcagctaactcaggagaatagtatttttag

SEQ ID NO: 1064517 - DNA, 33 bp, Homo sapien
catgtacttgttataactgggttctattatggt

SEQ ID NO: 1064518 - DNA, 33 bp, Homo sapien
catgtacttgttataattgggttctattatggt

SEQ ID NO: 1064519 - DNA, 33 bp, Homo sapien
tggaaggagtcctaaacttgtacagtattgaaa

SEQ ID NO: 1064520 - DNA, 33 bp, Homo sapien
tggaaggagtcctaaatttgtacagtattgaaa

SEQ ID NO: 1064521 - DNA, 33 bp, Homo sapien
ttccttgctgtagccccagcacctagctcattg

SEQ ID NO: 1064522 - DNA, 33 bp, Homo sapien
ttccttgctgtagccctagcacctagctcattg

SEQ ID NO: 1064523 - DNA, 33 bp, Homo sapien
tacatactgccatgacaaacttcaacactgtca

SEQ ID NO: 1064524 - DNA, 33 bp, Homo sapien
tacatactgccatgacgaacttcaacactgtca

SEQ ID NO: 1064525 - DNA, 33 bp, Homo sapien
taactaacagtgacagcagcatttatcttttcc

SEQ ID NO: 1064526 - DNA, 33 bp, Homo sapien
taactaacagtgacagtagcatttatcttttcc

SEQ ID NO: 1064527 - DNA, 33 bp, Homo sapien
ttctgcttttagtttcaactgtgaattttcaaa

SEQ ID NO: 1064528 - DNA, 33 bp, Homo sapien
ttctgcttttagtttcgactgtgaattttcaaa

SEQ ID NO: 1064529 - DNA, 33 bp, Homo sapien
cacagaacttttaggacaactcatgattttcaa

SEQ ID NO: 1064530 - DNA, 33 bp, Homo sapien
cacagaacttttaggataactcatgattttcaa

SEQ ID NO: 1064531 - DNA, 33 bp, Homo sapien
tgtggggatgtgatgcacatttactggtttata

SEQ ID NO: 1064532 - DNA, 33 bp, Homo sapien
tgtggggatgtgatgcgcatttactggtttata

SEQ ID NO: 1064533 - DNA, 33 bp, Homo sapien
ttaaaggtttgctaaaattcactgatatcaggc

SEQ ID NO: 1064534 - DNA, 33 bp, Homo sapien
ttaaaggtttgctaaacttcactgatatcaggc

SEQ ID NO: 1064535 - DNA, 33 bp, Homo sapien
gttctttggagccttcacagggttttatttggg

SEQ ID NO: 1064536 - DNA, 33 bp, Homo sapien
gttctttggagccttcccagggttttatttggg

SEQ ID NO: 1064537 - DNA, 33 bp, Homo sapien
cctctgtctcttaagaccattattgtcaaactc

SEQ ID NO: 1064538 - DNA, 33 bp, Homo sapien
cctctgtctcttaagatcattattgtcaaactc

SEQ ID NO: 1064539 - DNA, 33 bp, Homo sapien
caactggagctccttacgggccaatgggatgtt

SEQ ID NO: 1064540 - DNA, 33 bp, Homo sapien
caactggagctccttatgggccaatgggatgtt

SEQ ID NO: 1064541 - DNA, 33 bp, Homo sapien
aaaggcctggtaataaatgaaggatgctttaaa

SEQ ID NO: 1064542 - DNA, 33 bp, Homo sapien
aaaggcctggtaataattgaaggatgctttaaa

SEQ ID NO: 1064543 - DNA, 33 bp, Homo sapien
gtttaaaattagatagcatgaagctgaaggttt

SEQ ID NO: 1064544 - DNA, 33 bp, Homo sapien
gtttaaaattagataggatgaagctgaaggttt

SEQ ID NO: 1064545 - DNA, 33 bp, Homo sapien
gttcacgatgcatagcaaaacctttaggctgaa

SEQ ID NO: 1064546 - DNA, 33 bp, Homo sapien
gttcacgatgcatagcgaaacctttaggctgaa

SEQ ID NO: 1064547 - DNA, 33 bp, Homo sapien
tccaacatctgtgtcacaactggatcttgttct

SEQ ID NO: 1064548 - DNA, 33 bp, Homo sapien
tccaacatctgtgtcataactggatcttgttct

SEQ ID NO: 1064549 - DNA, 33 bp, Homo sapien
aaaacagtaaaaagtcgcaagttccctaataca

SEQ ID NO: 1064550 - DNA, 33 bp, Homo sapien
aaaacagtaaaaagtctcaagttccctaataca

SEQ ID NO: 1064551 - DNA, 33 bp, Homo sapien
tttgcagagagaaagacgaaaatactaagccta

SEQ ID NO: 1064552 - DNA, 33 bp, Homo sapien
tttgcagagagaaagatgaaaatactaagccta

SEQ ID NO: 1064553 - DNA, 33 bp, Homo sapien
gacaaataaaatccaaggagcaaaatagaatgt

SEQ ID NO: 1064554 - DNA, 33 bp, Homo sapien
gacaaataaaatccaatgagcaaaatagaatgt

SEQ ID NO: 1064555 - DNA, 33 bp, Homo sapien
aaagctaaaaagatcactccgttttagtagctt

SEQ ID NO: 1064556 - DNA, 33 bp, Homo sapien
aaagctaaaaagatcattccgttttagtagctt

SEQ ID NO: 1064557 - DNA, 33 bp, Homo sapien
tatcagaaagaacctgaagccattccacagttg

SEQ ID NO: 1064558 - DNA, 33 bp, Homo sapien
tatcagaaagaacctggagccattccacagttg

SEQ ID NO: 1064559 - DNA, 33 bp, Homo sapien
tatgaaatagtggtaccaagcagatgcgataat

SEQ ID NO: 1064560 - DNA, 33 bp, Homo sapien
tatgaaatagtggtactaagcagatgcgataat

SEQ ID NO: 1064561 - DNA, 33 bp, Homo sapien
ctgcagaatacgaatgccacttatcctaaagca

SEQ ID NO: 1064562 - DNA, 33 bp, Homo sapien
ctgcagaatacgaatggcacttatcctaaagca

SEQ ID NO: 1064563 - DNA, 33 bp, Homo sapien
tttgagttaacataccaggatatcgtgtggtta

SEQ ID NO: 1064564 - DNA, 33 bp, Homo sapien
tttgagttaacataccgggatatcgtgtggtta

SEQ ID NO: 1064565 - DNA, 33 bp, Homo sapien
aagaacagattggtaacgtcacttgaattattg

SEQ ID NO: 1064566 - DNA, 33 bp, Homo sapien
aagaacagattggtaatgtcacttgaattattg

SEQ ID NO: 1064567 - DNA, 33 bp, Homo sapien
cataactggtagctagaattattttcaaatccc

SEQ ID NO: 1064568 - DNA, 33 bp, Homo sapien
cataactggtagctagtattattttcaaatccc

SEQ ID NO: 1064569 - DNA, 33 bp, Homo sapien
tttcttttttacataccgccaactttatcagta

SEQ ID NO: 1064570 - DNA, 33 bp, Homo sapien
tttcttttttacatactgccaactttatcagta

SEQ ID NO: 1064571 - DNA, 33 bp, Homo sapien
cacgatgggaaaacggaatgaatacactttcag

SEQ ID NO: 1064572 - DNA, 33 bp, Homo sapien
cacgatgggaaaacgggatgaatacactttcag

SEQ ID NO: 1064573 - DNA, 33 bp, Homo sapien
aagtgttttataaatgcagaactttgccatctg

SEQ ID NO: 1064574 - DNA, 33 bp, Homo sapien
aagtgttttataaatggagaactttgccatctg

SEQ ID NO: 1064575 - DNA, 33 bp, Homo sapien
ttcccaatgatatcaccctttattggaaggaaa

SEQ ID NO: 1064576 - DNA, 33 bp, Homo sapien
ttcccaatgatatcactctttattggaaggaaa

SEQ ID NO: 1064577 - DNA, 33 bp, Homo sapien
gacagaaacaattggaataaataacgaatcctt

SEQ ID NO: 1064578 - DNA, 33 bp, Homo sapien
gacagaaacaattggactaaataacgaatcctt

SEQ ID NO: 1064579 - DNA, 33 bp, Homo sapien
ctgcaagccaatataaagaaggcagaaaaaagt

SEQ ID NO: 1064580 - DNA, 33 bp, Homo sapien
ctgcaagccaatataacgaaggcagaaaaaagt

SEQ ID NO: 1064581 - DNA, 33 bp, Homo sapien
gtttttgaactggaaggcacgttagaaattgtt

SEQ ID NO: 1064582 - DNA, 33 bp, Homo sapien
gtttttgaactggaagtcacgttagaaattgtt

SEQ ID NO: 1064583 - DNA, 33 bp, Homo sapien
tggagatgtcacttaggagcctggagaacagca

SEQ ID NO: 1064584 - DNA, 33 bp, Homo sapien
tggagatgtcacttagtagcctggagaacagca

SEQ ID NO: 1064585 - DNA, 33 bp, Homo sapien
tggtaggcctggcaaacattatgtttttcagag

SEQ ID NO: 1064586 - DNA, 33 bp, Homo sapien
tggtaggcctggcaaatattatgtttttcagag

SEQ ID NO: 1064587 - DNA, 33 bp, Homo sapien
tgatcgtagattttccacagttttctatttcat

SEQ ID NO: 1064588 - DNA, 33 bp, Homo sapien
tgatcgtagattttccgcagttttctatttcat

SEQ ID NO: 1064589 - DNA, 33 bp, Homo sapien
taatcaaccagaagaaaactgcaactaggatgc

SEQ ID NO: 1064590 - DNA, 33 bp, Homo sapien
taatcaaccagaagaagactgcaactaggatgc

SEQ ID NO: 1064591 - DNA, 33 bp, Homo sapien
accatggactattactaagcaatgattgatgca

SEQ ID NO: 1064592 - DNA, 33 bp, Homo sapien
accatggactattactgagcaatgattgatgca

SEQ ID NO: 1064593 - DNA, 33 bp, Homo sapien
aatactgccttgttgacggccaacaaaaaacac

SEQ ID NO: 1064594 - DNA, 33 bp, Homo sapien
aatactgccttgttgatggccaacaaaaaacac

SEQ ID NO: 1064595 - DNA, 33 bp, Homo sapien
ccttaaccttcataagcctattagaaacaatga

SEQ ID NO: 1064596 - DNA, 33 bp, Homo sapien
ccttaaccttcataagtctattagaaacaatga

SEQ ID NO: 1064597 - DNA, 33 bp, Homo sapien
tctaatgagctgtaaacaaaactgattgaaatt

SEQ ID NO: 1064598 - DNA, 33 bp, Homo sapien
tctaatgagctgtaaagaaaactgattgaaatt

SEQ ID NO: 1064599 - DNA, 33 bp, Homo sapien
gaaaatgatagtttcaatatatttcaatgctgt

SEQ ID NO: 1064600 - DNA, 33 bp, Homo sapien
gaaaatgatagtttcagtatatttcaatgctgt

SEQ ID NO: 1064601 - DNA, 33 bp, Homo sapien
aacaaatggcagttaacgtcccctcttttcaca

SEQ ID NO: 1064602 - DNA, 33 bp, Homo sapien
aacaaatggcagttaatgtcccctcttttcaca

SEQ ID NO: 1064603 - DNA, 33 bp, Homo sapien
ctcttcactgtattaaccagtttcttggctgta

SEQ ID NO: 1064604 - DNA, 33 bp, Homo sapien
ctcttcactgtattaatcagtttcttggctgta

SEQ ID NO: 1064605 - DNA, 33 bp, Homo sapien
acagagtacattttacaacttccactctactct

SEQ ID NO: 1064606 - DNA, 33 bp, Homo sapien
acagagtacattttacgacttccactctactct

SEQ ID NO: 1064607 - DNA, 33 bp, Homo sapien
tccagataaacaaaacaaaaagtgtattgtgta

SEQ ID NO: 1064608 - DNA, 33 bp, Homo sapien
tccagataaacaaaaccaaaagtgtattgtgta

SEQ ID NO: 1064609 - DNA, 33 bp, Homo sapien
tttgtggcagctgattaaagaaaaaaacaaaca

SEQ ID NO: 1064610 - DNA, 33 bp, Homo sapien
tttgtggcagctgatttaagaaaaaaacaaaca

SEQ ID NO: 1064611 - DNA, 33 bp, Homo sapien
cacactatttgacttcaaaatacaaaataaggc

SEQ ID NO: 1064612 - DNA, 33 bp, Homo sapien
cacactatttgacttcgaaatacaaaataaggc

SEQ ID NO: 1064613 - DNA, 33 bp, Homo sapien
gaaatcaataaaggaccattgggcggaaactat

SEQ ID NO: 1064614 - DNA, 33 bp, Homo sapien
gaaatcaataaaggactattgggcggaaactat

SEQ ID NO: 1064615 - DNA, 33 bp, Homo sapien
gttttaaagcataatacggaatcgacattctca

SEQ ID NO: 1064616 - DNA, 33 bp, Homo sapien
gttttaaagcataatagggaatcgacattctca

SEQ ID NO: 1064617 - DNA, 33 bp, Homo sapien
tgtttctggatgatggcatatatggtaacttgt

SEQ ID NO: 1064618 - DNA, 33 bp, Homo sapien
tgtttctggatgatggtatatatggtaacttgt

SEQ ID NO: 1064619 - DNA, 33 bp, Homo sapien
tatatatttgccaaaaatctaccaataggaaat

SEQ ID NO: 1064620 - DNA, 33 bp, Homo sapien
tatatatttgccaaaagtctaccaataggaaat

SEQ ID NO: 1064621 - DNA, 33 bp, Homo sapien
aacaaaacttataaaaccctgatgttgacttat

SEQ ID NO: 1064622 - DNA, 33 bp, Homo sapien
aacaaaacttataaaatcctgatgttgacttat

SEQ ID NO: 1064623 - DNA, 33 bp, Homo sapien
gggagagagagcaacaaatttaccagtggtaat

SEQ ID NO: 1064624 - DNA, 33 bp, Homo sapien
gggagagagagcaacatatttaccagtggtaat

SEQ ID NO: 1064625 - DNA, 33 bp, Homo sapien
attgaaatctctcgaaaccacaagtcacattta

SEQ ID NO: 1064626 - DNA, 33 bp, Homo sapien
attgaaatctctcgaatccacaagtcacattta

SEQ ID NO: 1064627 - DNA, 33 bp, Homo sapien
tttctattcatattacaaagtctctgttattat

SEQ ID NO: 1064628 - DNA, 33 bp, Homo sapien
tttctattcatattaccaagtctctgttattat

SEQ ID NO: 1064629 - DNA, 33 bp, Homo sapien
gagctccaggaaaaaaatatttgtataagctga

SEQ ID NO: 1064630 - DNA, 33 bp, Homo sapien
gagctccaggaaaaaactatttgtataagctga

SEQ ID NO: 1064631 - DNA, 33 bp, Homo sapien
attatgttttatgaccacatataaagaacgtga

SEQ ID NO: 1064632 - DNA, 33 bp, Homo sapien
attatgttttatgacctcatataaagaacgtga

SEQ ID NO: 1064633 - DNA, 33 bp, Homo sapien
gtggtatgtttttcatcacttttggaaagtttt

SEQ ID NO: 1064634 - DNA, 33 bp, Homo sapien
gtggtatgtttttcattacttttggaaagtttt

SEQ ID NO: 1064635 - DNA, 33 bp, Homo sapien
atgtctctatttcctccaccattccaactactt

SEQ ID NO: 1064636 - DNA, 33 bp, Homo sapien
atgtctctatttcctctaccattccaactactt

SEQ ID NO: 1064637 - DNA, 33 bp, Homo sapien
agatttaggaatggccacagaggaattatatgg

SEQ ID NO: 1064638 - DNA, 33 bp, Homo sapien
agatttaggaatggccgcagaggaattatatgg

SEQ ID NO: 1064639 - DNA, 33 bp, Homo sapien
taaaccaaaacttaatcacttcaacatctactt

SEQ ID NO: 1064640 - DNA, 33 bp, Homo sapien
taaaccaaaacttaatgacttcaacatctactt

SEQ ID NO: 1064641 - DNA, 33 bp, Homo sapien
cactgatgggcatttacgatgaatctatgtctt

SEQ ID NO: 1064642 - DNA, 33 bp, Homo sapien
cactgatgggcatttatgatgaatctatgtctt

SEQ ID NO: 1064643 - DNA, 33 bp, Homo sapien
tgcaaaacctgtagtacatcatattgccacatg

SEQ ID NO: 1064644 - DNA, 33 bp, Homo sapien
tgcaaaacctgtagtatatcatattgccacatg

SEQ ID NO: 1064645 - DNA, 33 bp, Homo sapien
ttgtctgtaacccatacaattattatgatcacg

SEQ ID NO: 1064646 - DNA, 33 bp, Homo sapien
ttgtctgtaacccatagaattattatgatcacg

SEQ ID NO: 1064647 - DNA, 33 bp, Homo sapien
attagccaataactaccactactcaatacatga

SEQ ID NO: 1064648 - DNA, 33 bp, Homo sapien
attagccaataactactactactcaatacatga

SEQ ID NO: 1064649 - DNA, 33 bp, Homo sapien
caaaacttcgtgccaactgaattctttttgttt

SEQ ID NO: 1064650 - DNA, 33 bp, Homo sapien
caaaacttcgtgccaattgaattctttttgttt

SEQ ID NO: 1064651 - DNA, 33 bp, Homo sapien
ggttttgagtcagtccacttgacaaatgcagta

SEQ ID NO: 1064652 - DNA, 33 bp, Homo sapien
ggttttgagtcagtcctcttgacaaatgcagta

SEQ ID NO: 1064653 - DNA, 33 bp, Homo sapien
ctgtaaaggaaattaaatcgatctagttttctc

SEQ ID NO: 1064654 - DNA, 33 bp, Homo sapien
ctgtaaaggaaattaagtcgatctagttttctc

SEQ ID NO: 1064655 - DNA, 33 bp, Homo sapien
tgtacactgactttgaaaacatatacatggcaa

SEQ ID NO: 1064656 - DNA, 33 bp, Homo sapien
tgtacactgactttgagaacatatacatggcaa

SEQ ID NO: 1064657 - DNA, 33 bp, Homo sapien
gcatgtgtctttaaaactgagagatttatattc

SEQ ID NO: 1064658 - DNA, 33 bp, Homo sapien
gcatgtgtctttaaaattgagagatttatattc

SEQ ID NO: 1064659 - DNA, 33 bp, Homo sapien
aaagtggtcaattcaccaagaggatataacaat

SEQ ID NO: 1064660 - DNA, 33 bp, Homo sapien
aaagtggtcaattcacgaagaggatataacaat

SEQ ID NO: 1064661 - DNA, 33 bp, Homo sapien
ccagtagctataaggacaatttaagttagtata

SEQ ID NO: 1064662 - DNA, 33 bp, Homo sapien
ccagtagctataaggataatttaagttagtata

SEQ ID NO: 1064663 - DNA, 33 bp, Homo sapien
ccatatctacaaggcaactgagctatacataag

SEQ ID NO: 1064664 - DNA, 33 bp, Homo sapien
ccatatctacaaggcagctgagctatacataag

SEQ ID NO: 1064665 - DNA, 33 bp, Homo sapien
gatttcaaatgctttcaatggtaataccattta

SEQ ID NO: 1064666 - DNA, 33 bp, Homo sapien
gatttcaaatgctttcgatggtaataccattta

SEQ ID NO: 1064667 - DNA, 33 bp, Homo sapien
tcctgcagtttttctgaagcaaaagttcacaat

SEQ ID NO: 1064668 - DNA, 33 bp, Homo sapien
tcctgcagtttttctggagcaaaagttcacaat

SEQ ID NO: 1064669 - DNA, 33 bp, Homo sapien
attaaatcataacagcagcacagaacttaatga

SEQ ID NO: 1064670 - DNA, 33 bp, Homo sapien
attaaatcataacagcggcacagaacttaatga

SEQ ID NO: 1064671 - DNA, 33 bp, Homo sapien
tattatcttaaaaaaacgaagtccatcagtaac

SEQ ID NO: 1064672 - DNA, 33 bp, Homo sapien
tattatcttaaaaaaatgaagtccatcagtaac

SEQ ID NO: 1064673 - DNA, 33 bp, Homo sapien
aatttacaattcccagaaaataatcacactgcc

SEQ ID NO: 1064674 - DNA, 33 bp, Homo sapien
aatttacaattcccagcaaataatcacactgcc

SEQ ID NO: 1064675 - DNA, 33 bp, Homo sapien
caccaagtgcagtcgccatcaggataaataatt

SEQ ID NO: 1064676 - DNA, 33 bp, Homo sapien
caccaagtgcagtcgctatcaggataaataatt

SEQ ID NO: 1064677 - DNA, 33 bp, Homo sapien
cttgtgatatattaaacgtctaagtttgtcaaa

SEQ ID NO: 1064678 - DNA, 33 bp, Homo sapien
cttgtgatatattaaatgtctaagtttgtcaaa

SEQ ID NO: 1064679 - DNA, 33 bp, Homo sapien
aaaatttgttgattccaagccccaatccagaaa

SEQ ID NO: 1064680 - DNA, 33 bp, Homo sapien
aaaatttgttgattcccagccccaatccagaaa

SEQ ID NO: 1064681 - DNA, 33 bp, Homo sapien
catttaaggtacctgaaaacatacaagacatat

SEQ ID NO: 1064682 - DNA, 33 bp, Homo sapien
catttaaggtacctgacaacatacaagacatat

SEQ ID NO: 1064683 - DNA, 33 bp, Homo sapien
aagcaacgtttcacaaaggtctcattgggtctc

SEQ ID NO: 1064684 - DNA, 33 bp, Homo sapien
aagcaacgtttcacaagggtctcattgggtctc

SEQ ID NO: 1064685 - DNA, 33 bp, Homo sapien
catgtcacaaatcagcacagtctctttgtacat

SEQ ID NO: 1064686 - DNA, 33 bp, Homo sapien
catgtcacaaatcagcgcagtctctttgtacat

SEQ ID NO: 1064687 - DNA, 33 bp, Homo sapien
ccatgttggctctgaacaaatcacaacttcctt

SEQ ID NO: 1064688 - DNA, 33 bp, Homo sapien
ccatgttggctctgaataaatcacaacttcctt

SEQ ID NO: 1064689 - DNA, 33 bp, Homo sapien
tggggtactcaggaagaaaaagctggaactcaa

SEQ ID NO: 1064690 - DNA, 33 bp, Homo sapien
tggggtactcaggaaggaaaagctggaactcaa

SEQ ID NO: 1064691 - DNA, 33 bp, Homo sapien
tgtctgtactatacagactagtggcctacagga

SEQ ID NO: 1064692 - DNA, 33 bp, Homo sapien
tgtctgtactatacaggctagtggcctacagga

SEQ ID NO: 1064693 - DNA, 33 bp, Homo sapien
gagtggtgtcagcacacaatttggaattggaca

SEQ ID NO: 1064694 - DNA, 33 bp, Homo sapien
gagtggtgtcagcacagaatttggaattggaca

SEQ ID NO: 1064695 - DNA, 33 bp, Homo sapien
cataatgcaaacctaaagcagtaaaattgaggg

SEQ ID NO: 1064696 - DNA, 33 bp, Homo sapien
cataatgcaaacctaaggcagtaaaattgaggg

SEQ ID NO: 1064697 - DNA, 33 bp, Homo sapien
acactattaagagtcaatcttcatgcacagtag

SEQ ID NO: 1064698 - DNA, 33 bp, Homo sapien
acactattaagagtcagtcttcatgcacagtag

SEQ ID NO: 1064699 - DNA, 33 bp, Homo sapien
ctacccagttaactccacgcaatttattgaata

SEQ ID NO: 1064700 - DNA, 33 bp, Homo sapien
ctacccagttaactccgcgcaatttattgaata

SEQ ID NO: 1064701 - DNA, 33 bp, Homo sapien
aagcatactgagttaacaagcccaagatcatgg

SEQ ID NO: 1064702 - DNA, 33 bp, Homo sapien
aagcatactgagttaagaagcccaagatcatgg

SEQ ID NO: 1064703 - DNA, 33 bp, Homo sapien
aaacagatctggtccaatctttgcggtataact

SEQ ID NO: 1064704 - DNA, 33 bp, Homo sapien
aaacagatctggtccactctttgcggtataact

SEQ ID NO: 1064705 - DNA, 33 bp, Homo sapien
aatgtcattatttgataacacagagcttttcat

SEQ ID NO: 1064706 - DNA, 33 bp, Homo sapien
aatgtcattatttgattacacagagcttttcat

SEQ ID NO: 1064707 - DNA, 33 bp, Homo sapien
ctcagttctgtactgcaaagtggatattggcaa

SEQ ID NO: 1064708 - DNA, 33 bp, Homo sapien
ctcagttctgtactgcgaagtggatattggcaa

SEQ ID NO: 1064709 - DNA, 33 bp, Homo sapien
acacaaaattccatccccttaatctataagaca

SEQ ID NO: 1064710 - DNA, 33 bp, Homo sapien
acacaaaattccatcctcttaatctataagaca

SEQ ID NO: 1064711 - DNA, 33 bp, Homo sapien
tccttgaaaaaaatagcccagaacaaaagctat

SEQ ID NO: 1064712 - DNA, 33 bp, Homo sapien
tccttgaaaaaaatagtccagaacaaaagctat

SEQ ID NO: 1064713 - DNA, 33 bp, Homo sapien
gaggccattatattatcacttaccagcaagcct

SEQ ID NO: 1064714 - DNA, 33 bp, Homo sapien
gaggccattatattattacttaccagcaagcct

SEQ ID NO: 1064715 - DNA, 33 bp, Homo sapien
ccttgtaaattgtgaaacctcttagtggtaagg

SEQ ID NO: 1064716 - DNA, 33 bp, Homo sapien
ccttgtaaattgtgaagcctcttagtggtaagg

SEQ ID NO: 1064717 - DNA, 33 bp, Homo sapien
ttctgtgccaattatgaaattatccttctcttt

SEQ ID NO: 1064718 - DNA, 33 bp, Homo sapien
ttctgtgccaattatgcaattatccttctcttt

SEQ ID NO: 1064719 - DNA, 33 bp, Homo sapien
tccaaggtcattgacgaaaccagtaactctgcc

SEQ ID NO: 1064720 - DNA, 33 bp, Homo sapien
tccaaggtcattgacggaaccagtaactctgcc

SEQ ID NO: 1064721 - DNA, 33 bp, Homo sapien
caaggcttcttaaatacactgactgttggattc

SEQ ID NO: 1064722 - DNA, 33 bp, Homo sapien
caaggcttcttaaatatactgactgttggattc

SEQ ID NO: 1064723 - DNA, 33 bp, Homo sapien
tgctttgtcctgtctgcaatggagacataatga

SEQ ID NO: 1064724 - DNA, 33 bp, Homo sapien
tgctttgtcctgtctggaatggagacataatga

SEQ ID NO: 1064725 - DNA, 33 bp, Homo sapien
atatctcttatttaaggcattgatttattttct

SEQ ID NO: 1064726 - DNA, 33 bp, Homo sapien
atatctcttatttaagtcattgatttattttct

SEQ ID NO: 1064727 - DNA, 33 bp, Homo sapien
atctggggcgttgaccaatattcttccttcttt

SEQ ID NO: 1064728 - DNA, 33 bp, Homo sapien
atctggggcgttgaccgatattcttccttcttt

SEQ ID NO: 1064729 - DNA, 33 bp, Homo sapien
aacacagagaagagtactaactgtacaactaca

SEQ ID NO: 1064730 - DNA, 33 bp, Homo sapien
aacacagagaagagtattaactgtacaactaca

SEQ ID NO: 1064731 - DNA, 33 bp, Homo sapien
gcactgaccttcataaagaattgttggaatgac

SEQ ID NO: 1064732 - DNA, 33 bp, Homo sapien
gcactgaccttcataaggaattgttggaatgac

SEQ ID NO: 1064733 - DNA, 33 bp, Homo sapien
ttcagaaactgaagtgaagatcctgtgacaaat

SEQ ID NO: 1064734 - DNA, 33 bp, Homo sapien
ttcagaaactgaagtggagatcctgtgacaaat

SEQ ID NO: 1064735 - DNA, 33 bp, Homo sapien
ggcactcacctcacgtaacagagaataatttct

SEQ ID NO: 1064736 - DNA, 33 bp, Homo sapien
ggcactcacctcacgtgacagagaataatttct

SEQ ID NO: 1064737 - DNA, 33 bp, Homo sapien
gtgtctagggatctgtgaatttgtgatttcaaa

SEQ ID NO: 1064738 - DNA, 33 bp, Homo sapien
gtgtctagggatctgttaatttgtgatttcaaa

SEQ ID NO: 1064739 - DNA, 33 bp, Homo sapien
acatacctgacttaaaaatgagttagtgcaatc

SEQ ID NO: 1064740 - DNA, 33 bp, Homo sapien
acatacctgacttaaagatgagttagtgcaatc

SEQ ID NO: 1064741 - DNA, 33 bp, Homo sapien
ggctcttttctgataacctataacaaacatcaa

SEQ ID NO: 1064742 - DNA, 33 bp, Homo sapien
ggctcttttctgataatctataacaaacatcaa

SEQ ID NO: 1064743 - DNA, 33 bp, Homo sapien
acaacaaaaagaagccacggtgctagtccatga

SEQ ID NO: 1064744 - DNA, 33 bp, Homo sapien
acaacaaaaagaagccgcggtgctagtccatga

SEQ ID NO: 1064745 - DNA, 33 bp, Homo sapien
aattcaagattgagaccgaaaccaaaatttaaa

SEQ ID NO: 1064746 - DNA, 33 bp, Homo sapien
aattcaagattgagactgaaaccaaaatttaaa

SEQ ID NO: 1064747 - DNA, 33 bp, Homo sapien
ggggttcagttgttcacaagtaacggcactgtt

SEQ ID NO: 1064748 - DNA, 33 bp, Homo sapien
ggggttcagttgttcataagtaacggcactgtt

SEQ ID NO: 1064749 - DNA, 33 bp, Homo sapien
gagcaaagagtctgagaagtagtctcggccatt

SEQ ID NO: 1064750 - DNA, 33 bp, Homo sapien
gagcaaagagtctgaggagtagtctcggccatt

SEQ ID NO: 1064751 - DNA, 33 bp, Homo sapien
tattttctcaaagtcactcaactagggaaatgg

SEQ ID NO: 1064752 - DNA, 33 bp, Homo sapien
tattttctcaaagtcagtcaactagggaaatgg

SEQ ID NO: 1064753 - DNA, 33 bp, Homo sapien
caacctgtgctgagaaccttgctatttatctcc

SEQ ID NO: 1064754 - DNA, 33 bp, Homo sapien
caacctgtgctgagaatcttgctatttatctcc

SEQ ID NO: 1064755 - DNA, 33 bp, Homo sapien
atagctatatgtcctcagacaagaggttaacaa

SEQ ID NO: 1064756 - DNA, 33 bp, Homo sapien
atagctatatgtcctccgacaagaggttaacaa

SEQ ID NO: 1064757 - DNA, 33 bp, Homo sapien
gcaacaccaacaaccaacttcagtgaaccaagt

SEQ ID NO: 1064758 - DNA, 33 bp, Homo sapien
gcaacaccaacaaccagcttcagtgaaccaagt

SEQ ID NO: 1064759 - DNA, 33 bp, Homo sapien
actcccttaggcaatggcatcttagttgaatgc

SEQ ID NO: 1064760 - DNA, 33 bp, Homo sapien
actcccttaggcaatgtcatcttagttgaatgc

SEQ ID NO: 1064761 - DNA, 33 bp, Homo sapien
ctcttcctctagaacactccaggtctgtgataa

SEQ ID NO: 1064762 - DNA, 33 bp, Homo sapien
ctcttcctctagaacattccaggtctgtgataa

SEQ ID NO: 1064763 - DNA, 33 bp, Homo sapien
tttatatactatcctcaaaataatcctacaaga

SEQ ID NO: 1064764 - DNA, 33 bp, Homo sapien
tttatatactatcctcgaaataatcctacaaga

SEQ ID NO: 1064765 - DNA, 33 bp, Homo sapien
gttgtgttgccattgaccaaaatccccacccca

SEQ ID NO: 1064766 - DNA, 33 bp, Homo sapien
gttgtgttgccattgatcaaaatccccacccca

SEQ ID NO: 1064767 - DNA, 33 bp, Homo sapien
gacagattctccccctaaatcatagttgtggtt

SEQ ID NO: 1064768 - DNA, 33 bp, Homo sapien
gacagattctcccccttaatcatagttgtggtt

SEQ ID NO: 1064769 - DNA, 33 bp, Homo sapien
gcctttggtgactctcaagactcccttcctagc

SEQ ID NO: 1064770 - DNA, 33 bp, Homo sapien
gcctttggtgactctcgagactcccttcctagc

SEQ ID NO: 1064771 - DNA, 33 bp, Homo sapien
ctataaagtaaccacaagttcaaatctgcataa

SEQ ID NO: 1064772 - DNA, 33 bp, Homo sapien
ctataaagtaaccacaggttcaaatctgcataa

SEQ ID NO: 1064773 - DNA, 33 bp, Homo sapien; identical to SEQ ID NO: 1064771

SEQ ID NO: 1064774 - DNA, 33 bp, Homo sapien; identical to SEQ ID NO: 1064772

SEQ ID NO: 1064775 - DNA, 33 bp, Homo sapien
gactgtttaccctcatcaaagcctggtttttga

SEQ ID NO: 1064776 - DNA, 33 bp, Homo sapien
gactgtttaccctcatgaaagcctggtttttga

SEQ ID NO: 1064777 - DNA, 33 bp, Homo sapien
tacaaaagagctattacgttgtgaagaaatttc

SEQ ID NO: 1064778 - DNA, 33 bp, Homo sapien
tacaaaagagctattaggttgtgaagaaatttc

SEQ ID NO: 1064779 - DNA, 33 bp, Homo sapien
attaggatgagccctaagaagaggcagttgggt

SEQ ID NO: 1064780 - DNA, 33 bp, Homo sapien
attaggatgagccctaggaagaggcagttgggt

SEQ ID NO: 1064781 - DNA, 33 bp, Homo sapien
gcaccaatttatatgacccatcaggctttttga

SEQ ID NO: 1064782 - DNA, 33 bp, Homo sapien
gcaccaatttatatgatccatcaggctttttga

SEQ ID NO: 1064783 - DNA, 33 bp, Homo sapien
cccagttggctccatcactgtagaaaaaaattg

SEQ ID NO: 1064784 - DNA, 33 bp, Homo sapien
cccagttggctccatcgctgtagaaaaaaattg

SEQ ID NO: 1064785 - DNA, 33 bp, Homo sapien
aaatatttattgcagggatattaaatgtcaggc

SEQ ID NO: 1064786 - DNA, 33 bp, Homo sapien
aaatatttattgcaggtatattaaatgtcaggc

SEQ ID NO: 1064787 - DNA, 33 bp, Homo sapien
caataaatctcaataaacaagccataattcaaa

SEQ ID NO: 1064788 - DNA, 33 bp, Homo sapien
caataaatctcaataagcaagccataattcaaa

SEQ ID NO: 1064789 - DNA, 33 bp, Homo sapien
cactttagatttggcaactaagcactaaaccaa

SEQ ID NO: 1064790 - DNA, 33 bp, Homo sapien
cactttagatttggcacctaagcactaaaccaa

SEQ ID NO: 1064791 - DNA, 33 bp, Homo sapien
tttatatcctgagtcaacatgctaaatcccaag

SEQ ID NO: 1064792 - DNA, 33 bp, Homo sapien
tttatatcctgagtcatcatgctaaatcccaag

SEQ ID NO: 1064793 - DNA, 33 bp, Homo sapien
tttacctttctagttacgattctgagtaattgt

SEQ ID NO: 1064794 - DNA, 33 bp, Homo sapien
tttacctttctagttatgattctgagtaattgt

SEQ ID NO: 1064795 - DNA, 33 bp, Homo sapien
agcccactgcgagcacagatcttgattgaatca

SEQ ID NO: 1064796 - DNA, 33 bp, Homo sapien
agcccactgcgagcacggatcttgattgaatca

SEQ ID NO: 1064797 - DNA, 33 bp, Homo sapien
ctgctttcaaaagatacgcactgctacaagtta

SEQ ID NO: 1064798 - DNA, 33 bp, Homo sapien
ctgctttcaaaagatatgcactgctacaagtta

SEQ ID NO: 1064799 - DNA, 33 bp, Homo sapien
ctggatgcataaagagccctcaataaatatttg

SEQ ID NO: 1064800 - DNA, 33 bp, Homo sapien
ctggatgcataaagagtcctcaataaatatttg

SEQ ID NO: 1064801 - DNA, 33 bp, Homo sapien
ggcataaagacaaaaacgttgaaaggctggaga

SEQ ID NO: 1064802 - DNA, 33 bp, Homo sapien
ggcataaagacaaaaatgttgaaaggctggaga

SEQ ID NO: 1064803 - DNA, 33 bp, Homo sapien
ttggaggaatcttaaacgttcattggtgggaga

SEQ ID NO: 1064804 - DNA, 33 bp, Homo sapien
ttggaggaatcttaaatgttcattggtgggaga

SEQ ID NO: 1064805 - DNA, 33 bp, Homo sapien
tcatatagtggattaacagtgtcccgcttgatg

SEQ ID NO: 1064806 - DNA, 33 bp, Homo sapien
tcatatagtggattaatagtgtcccgcttgatg

SEQ ID NO: 1064807 - DNA, 33 bp, Homo sapien
tcattttcttttactaacgaatggaataggaaa

SEQ ID NO: 1064808 - DNA, 33 bp, Homo sapien
tcattttcttttactagcgaatggaataggaaa

SEQ ID NO: 1064809 - DNA, 33 bp, Homo sapien
ctacaactactttttcactcatggccatatttt

SEQ ID NO: 1064810 - DNA, 33 bp, Homo sapien
ctacaactactttttccctcatggccatatttt

SEQ ID NO: 1064811 - DNA, 33 bp, Homo sapien
ttgtgtggtataatagaaagacattggatttaa

SEQ ID NO: 1064812 - DNA, 33 bp, Homo sapien
ttgtgtggtataataggaagacattggatttaa

SEQ ID NO: 1064813 - DNA, 33 bp, Homo sapien
aaataatagaaagaacaagcaagaagaatagtg

SEQ ID NO: 1064814 - DNA, 33 bp, Homo sapien
aaataatagaaagaacgagcaagaagaatagtg

SEQ ID NO: 1064815 - DNA, 33 bp, Homo sapien
gaaattgtttgatgaaatgctctgtaaatgtca

SEQ ID NO: 1064816 - DNA, 33 bp, Homo sapien
gaaattgtttgatgaagtgctctgtaaatgtca

SEQ ID NO: 1064817 - DNA, 33 bp, Homo sapien
tctacctttagatccaacaatatttgctataca

SEQ ID NO: 1064818 - DNA, 33 bp, Homo sapien
tctacctttagatccatcaatatttgctataca

SEQ ID NO: 1064819 - DNA, 33 bp, Homo sapien
gtgcctggctgtataaaatgttttgtgtaaacc

SEQ ID NO: 1064820 - DNA, 33 bp, Homo sapien
gtgcctggctgtataagatgttttgtgtaaacc

SEQ ID NO: 1064821 - DNA, 33 bp, Homo sapien
cagttgaagactgacactgcctaatcgcctcgg

SEQ ID NO: 1064822 - DNA, 33 bp, Homo sapien
cagttgaagactgacattgcctaatcgcctcgg

SEQ ID NO: 1064823 - DNA, 33 bp, Homo sapien
tcccagcacagaggagaattttggctgagttgg

SEQ ID NO: 1064824 - DNA, 33 bp, Homo sapien
tcccagcacagaggagcattttggctgagttgg

SEQ ID NO: 1064825 - DNA, 33 bp, Homo sapien; identical to SEQ ID NO: 1064823

SEQ ID NO: 1064826 - DNA, 33 bp, Homo sapien; identical to SEQ ID NO: 1064824

SEQ ID NO: 1064827 - DNA, 33 bp, Homo sapien; identical to SEQ ID NO: 1064823

SEQ ID NO: 1064828 - DNA, 33 bp, Homo sapien; identical to SEQ ID NO: 1064824

SEQ ID NO: 1064829 - DNA, 33 bp, Homo sapien
aagggaactgcaatgacagcacaaagattatag

SEQ ID NO: 1064830 - DNA, 33 bp, Homo sapien
aagggaactgcaatgagagcacaaagattatag

SEQ ID NO: 1064831 - DNA, 33 bp, Homo sapien; identical to SEQ ID NO: 1064829

SEQ ID NO: 1064832 - DNA, 33 bp, Homo sapien; identical to SEQ ID NO: 1064830

SEQ ID NO: 1064833 - DNA, 33 bp, Homo sapien
ttttgtgccatgcaaaaactaatgataaagagc

SEQ ID NO: 1064834 - DNA, 33 bp, Homo sapien
ttttgtgccatgcaaatactaatgataaagagc

SEQ ID NO: 1064835 - DNA, 33 bp, Homo sapien
cagagatataaatccacgtattctagaatttcg

SEQ ID NO: 1064836 - DNA, 33 bp, Homo sapien
cagagatataaatccatgtattctagaatttcg

SEQ ID NO: 1064837 - DNA, 33 bp, Homo sapien
ggaatttctcaactcaatattaaattcagtatg

SEQ ID NO: 1064838 - DNA, 33 bp, Homo sapien
ggaatttctcaactcagtattaaattcagtatg

SEQ ID NO: 1064839 - DNA, 33 bp, Homo sapien
tggaacaatgttgatcaaatgtcacacatatgc

SEQ ID NO: 1064840 - DNA, 33 bp, Homo sapien
tggaacaatgttgatcgaatgtcacacatatgc

SEQ ID NO: 1064841 - DNA, 33 bp, Homo sapien
caaatttagtcaatgccgcataatccataaacc

SEQ ID NO: 1064842 - DNA, 33 bp, Homo sapien
caaatttagtcaatgctgcataatccataaacc

SEQ ID NO: 1064843 - DNA, 33 bp, Homo sapien; identical to SEQ ID NO: 1064841

SEQ ID NO: 1064844 - DNA, 33 bp, Homo sapien; identical to SEQ ID NO: 1064842

SEQ ID NO: 1064845 - DNA, 33 bp, Homo sapien
atgtggattttttatgcaaaggacttgctggag

SEQ ID NO: 1064846 - DNA, 33 bp, Homo sapien
atgtggattttttatgtaaaggacttgctggag

SEQ ID NO: 1064847 - DNA, 33 bp, Homo sapien
aatgttaaaacaatgcaaatccatatgtataac

SEQ ID NO: 1064848 - DNA, 33 bp, Homo sapien
aatgttaaaacaatgcgaatccatatgtataac

SEQ ID NO: 1064849 - DNA, 33 bp, Homo sapien
aactgggacttgtgacacaaagaggcaaagtta

SEQ ID NO: 1064850 - DNA, 33 bp, Homo sapien
aactgggacttgtgacgcaaagaggcaaagtta

SEQ ID NO: 1064851 - DNA, 33 bp, Homo sapien; identical to SEQ ID NO: 1064849

SEQ ID NO: 1064852 - DNA, 33 bp, Homo sapien; identical to SEQ ID NO: 1064850

SEQ ID NO: 1064853 - DNA, 33 bp, Homo sapien
tcaaattttatttccactatcagtccccctgaa

SEQ ID NO: 1064854 - DNA, 33 bp, Homo sapien
tcaaattttatttccattatcagtccccctgaa

SEQ ID NO: 1064855 - DNA, 33 bp, Homo sapien
ggaagggactctgcgacgtgtttggtttgactt

SEQ ID NO: 1064856 - DNA, 33 bp, Homo sapien
ggaagggactctgcgatgtgtttggtttgactt

SEQ ID NO: 1064857 - DNA, 33 bp, Homo sapien
tgatggaaaattgttaagtgtcagacataatag

SEQ ID NO: 1064858 - DNA, 33 bp, Homo sapien
tgatggaaaattgttacgtgtcagacataatag

SEQ ID NO: 1064859 - DNA, 33 bp, Homo sapien
ggagtttcacctactacggtggtttccagcctt

SEQ ID NO: 1064860 - DNA, 33 bp, Homo sapien
ggagtttcacctactatggtggtttccagcctt

SEQ ID NO: 1064861 - DNA, 33 bp, Homo sapien
gagaccaaaaatccaaagtgattctcatccttg

SEQ ID NO: 1064862 - DNA, 33 bp, Homo sapien
gagaccaaaaatccaacgtgattctcatccttg

SEQ ID NO: 1064863 - DNA, 33 bp, Homo sapien
ttgtgaaccagtagtcaagatttacctgtcaaa

SEQ ID NO: 1064864 - DNA, 33 bp, Homo sapien
ttgtgaaccagtagtcgagatttacctgtcaaa

SEQ ID NO: 1064865 - DNA, 33 bp, Homo sapien
atgtatcactttccccacgtacttcacccactt

SEQ ID NO: 1064866 - DNA, 33 bp, Homo sapien
atgtatcactttccccgcgtacttcacccactt

SEQ ID NO: 1064867 - DNA, 33 bp, Homo sapien
gtcaccactactccgcaaaaacagtacacatta

SEQ ID NO: 1064868 - DNA, 33 bp, Homo sapien
gtcaccactactccgcgaaaacagtacacatta

SEQ ID NO: 1064869 - DNA, 33 bp, Homo sapien
atagtaagaataaagacagttgacagattcact

SEQ ID NO: 1064870 - DNA, 33 bp, Homo sapien
atagtaagaataaagagagttgacagattcact

SEQ ID NO: 1064871 - DNA, 33 bp, Homo sapien
ggattcttttgatgtcactattctactccacag

SEQ ID NO: 1064872 - DNA, 33 bp, Homo sapien
ggattcttttgatgtcgctattctactccacag

SEQ ID NO: 1064873 - DNA, 33 bp, Homo sapien
aaaacaaatttcctataaagagaatcctgatat

SEQ ID NO: 1064874 - DNA, 33 bp, Homo sapien
aaaacaaatttcctatgaagagaatcctgatat

SEQ ID NO: 1064875 - DNA, 33 bp, Homo sapien
tctccacagatactaaaaacttaaacttactac

SEQ ID NO: 1064876 - DNA, 33 bp, Homo sapien
tctccacagatactaacaacttaaacttactac

SEQ ID NO: 1064877 - DNA, 33 bp, Homo sapien
acaacacattactaaccgaattcaacatatgac

SEQ ID NO: 1064878 - DNA, 33 bp, Homo sapien
acaacacattactaactgaattcaacatatgac

SEQ ID NO: 1064879 - DNA, 33 bp, Homo sapien
ttttgatatctcagaaattaatgattaggttat

SEQ ID NO: 1064880 - DNA, 33 bp, Homo sapien
ttttgatatctcagaatttaatgattaggttat

SEQ ID NO: 1064881 - DNA, 33 bp, Homo sapien
ttggtaagttgagatgcatatttagaggcaggt

SEQ ID NO: 1064882 - DNA, 33 bp, Homo sapien
ttggtaagttgagatgtatatttagaggcaggt

SEQ ID NO: 1064883 - DNA, 33 bp, Homo sapien
aataggatttaagtagacaaagaagggagagaa

SEQ ID NO: 1064884 - DNA, 33 bp, Homo sapien
aataggatttaagtaggcaaagaagggagagaa

SEQ ID NO: 1064885 - DNA, 33 bp, Homo sapien
gaatttatattttgtacggatgtgatctaggaa

SEQ ID NO: 1064886 - DNA, 33 bp, Homo sapien
gaatttatattttgtatggatgtgatctaggaa

SEQ ID NO: 1064887 - DNA, 33 bp, Homo sapien
gactcctaaataaacaactacaagctggcttaa

SEQ ID NO: 1064888 - DNA, 33 bp, Homo sapien
gactcctaaataaacatctacaagctggcttaa

SEQ ID NO: 1064889 - DNA, 33 bp, Homo sapien
atgtgaaaaaatcctaccacaaaacagatgtgt

SEQ ID NO: 1064890 - DNA, 33 bp, Homo sapien
atgtgaaaaaatcctatcacaaaacagatgtgt

SEQ ID NO: 1064891 - DNA, 33 bp, Homo sapien
aaccaacagagtagaggcatcgttgaactgaag

SEQ ID NO: 1064892 - DNA, 33 bp, Homo sapien
aaccaacagagtagagtcatcgttgaactgaag

SEQ ID NO: 1064893 - DNA, 33 bp, Homo sapien
ttctttgctgaagtaaaccaggctctgacctaa

SEQ ID NO: 1064894 - DNA, 33 bp, Homo sapien
ttctttgctgaagtaagccaggctctgacctaa

SEQ ID NO: 1064895 - DNA, 33 bp, Homo sapien
atgggaataataaacaccaaatccaggatagtg

SEQ ID NO: 1064896 - DNA, 33 bp, Homo sapien
atgggaataataaacatcaaatccaggatagtg

SEQ ID NO: 1064897 - DNA, 33 bp, Homo sapien
tcttttggaccttccacgaatggctcagtttac

SEQ ID NO: 1064898 - DNA, 33 bp, Homo sapien
tcttttggaccttccaggaatggctcagtttac

SEQ ID NO: 1064899 - DNA, 33 bp, Homo sapien
gtgccctgcctgtgtacataagaagtctctagt

SEQ ID NO: 1064900 - DNA, 33 bp, Homo sapien
gtgccctgcctgtgtatataagaagtctctagt

SEQ ID NO: 1064901 - DNA, 33 bp, Homo sapien
ttaaaaagtaaggaaacggcagcatagagaggt

SEQ ID NO: 1064902 - DNA, 33 bp, Homo sapien
ttaaaaagtaaggaaatggcagcatagagaggt

SEQ ID NO: 1064903 - DNA, 33 bp, Homo sapien
tgaataattaatttgaacataagctttggtact

SEQ ID NO: 1064904 - DNA, 33 bp, Homo sapien
tgaataattaatttgagcataagctttggtact

SEQ ID NO: 1064905 - DNA, 33 bp, Homo sapien
gctcaggagtctgtcaaagtaaggtcaggaagg

SEQ ID NO: 1064906 - DNA, 33 bp, Homo sapien
gctcaggagtctgtcagagtaaggtcaggaagg

SEQ ID NO: 1064907 - DNA, 33 bp, Homo sapien
ggttgtgctcaatgtacatttatttgtggaata

SEQ ID NO: 1064908 - DNA, 33 bp, Homo sapien
ggttgtgctcaatgtatatttatttgtggaata

SEQ ID NO: 1064909 - DNA, 33 bp, Homo sapien
gacagtcactgcagtacgtgtggggaattttcc

SEQ ID NO: 1064910 - DNA, 33 bp, Homo sapien
gacagtcactgcagtatgtgtggggaattttcc

SEQ ID NO: 1064911 - DNA, 33 bp, Homo sapien
ttgtcaaatagtatcacagaacagttaggactg

SEQ ID NO: 1064912 - DNA, 33 bp, Homo sapien
ttgtcaaatagtatcagagaacagttaggactg

SEQ ID NO: 1064913 - DNA, 33 bp, Homo sapien
ttggagcaaatcttctcaccttaacaatacagc

SEQ ID NO: 1064914 - DNA, 33 bp, Homo sapien
ttggagcaaatcttcttaccttaacaatacagc

SEQ ID NO: 1064915 - DNA, 33 bp, Homo sapien
ctaatttggataaatgaactaacataagggact

SEQ ID NO: 1064916 - DNA, 33 bp, Homo sapien
ctaatttggataaatggactaacataagggact

SEQ ID NO: 1064917 - DNA, 33 bp, Homo sapien
ctgtaacaaaacgacactggacaaaacgatgtt

SEQ ID NO: 1064918 - DNA, 33 bp, Homo sapien
ctgtaacaaaacgacattggacaaaacgatgtt

SEQ ID NO: 1064919 - DNA, 33 bp, Homo sapien
aggagaggggagcaaccgatcgtgttagagggc

SEQ ID NO: 1064920 - DNA, 33 bp, Homo sapien
aggagaggggagcaactgatcgtgttagagggc

SEQ ID NO: 1064921 - DNA, 33 bp, Homo sapien
gacatggaaagcaaaaccacaatgagatactac

SEQ ID NO: 1064922 - DNA, 33 bp, Homo sapien
gacatggaaagcaaaatcacaatgagatactac

SEQ ID NO: 1064923 - DNA, 33 bp, Homo sapien
aaaatatcaccctgtacgctgtaaatatgtaca

SEQ ID NO: 1064924 - DNA, 33 bp, Homo sapien
aaaatatcaccctgtatgctgtaaatatgtaca

SEQ ID NO: 1064925 - DNA, 33 bp, Homo sapien
atcttgataagattaacggttctcaagttttgt

SEQ ID NO: 1064926 - DNA, 33 bp, Homo sapien
atcttgataagattaatggttctcaagttttgt

SEQ ID NO: 1064927 - DNA, 33 bp, Homo sapien
tctgagcaaaggccaaaaaattattgtgcctga

SEQ ID NO: 1064928 - DNA, 33 bp, Homo sapien
tctgagcaaaggccaagaaattattgtgcctga

SEQ ID NO: 1064929 - DNA, 33 bp, Homo sapien
atgaggatgctgatcacgggaattatgccgcag

SEQ ID NO: 1064930 - DNA, 33 bp, Homo sapien
atgaggatgctgatcatgggaattatgccgcag

SEQ ID NO: 1064931 - DNA, 33 bp, Homo sapien
cagttatttgataaaacaatgtcactttccaaa

SEQ ID NO: 1064932 - DNA, 33 bp, Homo sapien
cagttatttgataaaataatgtcactttccaaa

SEQ ID NO: 1064933 - DNA, 33 bp, Homo sapien
atatgacatttagaataaaagtgattggtgacc

SEQ ID NO: 1064934 - DNA, 33 bp, Homo sapien
atatgacatttagaatgaaagtgattggtgacc

SEQ ID NO: 1064935 - DNA, 33 bp, Homo sapien
cagcacttactattgccaggccctgttttaaaa

SEQ ID NO: 1064936 - DNA, 33 bp, Homo sapien
cagcacttactattgctaggccctgttttaaaa

SEQ ID NO: 1064937 - DNA, 33 bp, Homo sapien
tccatttctcttcaatgatctccagaatatttt

SEQ ID NO: 1064938 - DNA, 33 bp, Homo sapien
tccatttctcttcaattatctccagaatatttt

SEQ ID NO: 1064939 - DNA, 33 bp, Homo sapien
gatcttagctattcaaattacttattattaaat

SEQ ID NO: 1064940 - DNA, 33 bp, Homo sapien
gatcttagctattcaagttacttattattaaat

SEQ ID NO: 1064941 - DNA, 33 bp, Homo sapien
tcttatgatataggaaaccttcccagtagccaa

SEQ ID NO: 1064942 - DNA, 33 bp, Homo sapien
tcttatgatataggaagccttcccagtagccaa

SEQ ID NO: 1064943 - DNA, 33 bp, Homo sapien
aattgtactcttgtggaatttgtatgtaaagta

SEQ ID NO: 1064944 - DNA, 33 bp, Homo sapien
aattgtactcttgtgggatttgtatgtaaagta

SEQ ID NO: 1064945 - DNA, 33 bp, Homo sapien
taattctcccatattcaagtttatattccagcc

SEQ ID NO: 1064946 - DNA, 33 bp, Homo sapien
taattctcccatattccagtttatattccagcc

SEQ ID NO: 1064947 - DNA, 33 bp, Homo sapien
gtattgtggatcaaaacctgacttgagactaga

SEQ ID NO: 1064948 - DNA, 33 bp, Homo sapien
gtattgtggatcaaaagctgacttgagactaga

SEQ ID NO: 1064949 - DNA, 33 bp, Homo sapien
aggatctggtgtaaggccatagctatagataag

SEQ ID NO: 1064950 - DNA, 33 bp, Homo sapien
aggatctggtgtaaggtcatagctatagataag

SEQ ID NO: 1064951 - DNA, 33 bp, Homo sapien
aagggcatagccttggacatacacacattcttc

SEQ ID NO: 1064952 - DNA, 33 bp, Homo sapien
aagggcatagccttgggcatacacacattcttc

SEQ ID NO: 1064953 - DNA, 33 bp, Homo sapien
tcagtagtttctatcaataatgtgcaaaatgat

SEQ ID NO: 1064954 - DNA, 33 bp, Homo sapien
tcagtagtttctatcagtaatgtgcaaaatgat

SEQ ID NO: 1064955 - DNA, 33 bp, Homo sapien
tattggtacacaaataaacacatagactaatgg

SEQ ID NO: 1064956 - DNA, 33 bp, Homo sapien
tattggtacacaaatagacacatagactaatgg

SEQ ID NO: 1064957 - DNA, 33 bp, Homo sapien
tagacaaacagatctcagaagtatagcaagaaa

SEQ ID NO: 1064958 - DNA, 33 bp, Homo sapien
tagacaaacagatctcggaagtatagcaagaaa

SEQ ID NO: 1064959 - DNA, 33 bp, Homo sapien
ctggacagttttgttgcattaaattgtgtaggt

SEQ ID NO: 1064960 - DNA, 33 bp, Homo sapien
ctggacagttttgttggattaaattgtgtaggt

SEQ ID NO: 1064961 - DNA, 33 bp, Homo sapien
gtaaaccattgcctagaaaaagcagtcactgag

SEQ ID NO: 1064962 - DNA, 33 bp, Homo sapien
gtaaaccattgcctagtaaaagcagtcactgag

SEQ ID NO: 1064963 - DNA, 33 bp, Homo sapien
ttacctgtaattgcaaagataatacagacaggc

SEQ ID NO: 1064964 - DNA, 33 bp, Homo sapien
ttacctgtaattgcaaggataatacagacaggc

SEQ ID NO: 1064965 - DNA, 33 bp, Homo sapien
tgcatctcttaggccaagtggtagtagcagaca

SEQ ID NO: 1064966 - DNA, 33 bp, Homo sapien
tgcatctcttaggccaggtggtagtagcagaca

SEQ ID NO: 1064967 - DNA, 33 bp, Homo sapien
gacctttgagtaaagacctgaagtctgtgaggg

SEQ ID NO: 1064968 - DNA, 33 bp, Homo sapien
gacctttgagtaaagatctgaagtctgtgaggg

SEQ ID NO: 1064969 - DNA, 33 bp, Homo sapien
ataaacaacagaaatacatcactcacaattcta

SEQ ID NO: 1064970 - DNA, 33 bp, Homo sapien
ataaacaacagaaatatatcactcacaattcta

SEQ ID NO: 1064971 - DNA, 33 bp, Homo sapien
tcgtgctcccttgaacaaatccactggactcag

SEQ ID NO: 1064972 - DNA, 33 bp, Homo sapien
tcgtgctcccttgaacgaatccactggactcag

SEQ ID NO: 1064973 - DNA, 33 bp, Homo sapien
tttggcattggtattacagttggaaaaaacttc

SEQ ID NO: 1064974 - DNA, 33 bp, Homo sapien
tttggcattggtattatagttggaaaaaacttc

SEQ ID NO: 1064975 - DNA, 33 bp, Homo sapien
tgctgttaagtagatacctgtagagctgggcag

SEQ ID NO: 1064976 - DNA, 33 bp, Homo sapien
tgctgttaagtagatatctgtagagctgggcag

SEQ ID NO: 1064977 - DNA, 33 bp, Homo sapien
gatttcataaagtaaacgaagtctttggaatca

SEQ ID NO: 1064978 - DNA, 33 bp, Homo sapien
gatttcataaagtaaaggaagtctttggaatca

SEQ ID NO: 1064979 - DNA, 33 bp, Homo sapien
tgtgcttctttcaacaatgtaaagtaaaaacca

SEQ ID NO: 1064980 - DNA, 33 bp, Homo sapien
tgtgcttctttcaacactgtaaagtaaaaacca

SEQ ID NO: 1064981 - DNA, 33 bp, Homo sapien
tgcagactcatagaggcaccgccttgatggttt

SEQ ID NO: 1064982 - DNA, 33 bp, Homo sapien
tgcagactcatagaggtaccgccttgatggttt

SEQ ID NO: 1064983 - DNA, 33 bp, Homo sapien
aattctatcagatcaaattaacaaacagattga

SEQ ID NO: 1064984 - DNA, 33 bp, Homo sapien
aattctatcagatcaacttaacaaacagattga

SEQ ID NO: 1064985 - DNA, 33 bp, Homo sapien
aggatttgtagctatacggtctaactagaaaga

SEQ ID NO: 1064986 - DNA, 33 bp, Homo sapien
aggatttgtagctatatggtctaactagaaaga

SEQ ID NO: 1064987 - DNA, 33 bp, Homo sapien
tattatactgaatgatcaagagtaggaataaac

SEQ ID NO: 1064988 - DNA, 33 bp, Homo sapien
tattatactgaatgattaagagtaggaataaac

SEQ ID NO: 1064989 - DNA, 33 bp, Homo sapien
gctgactgtacgttgccatttactatagtcaca

SEQ ID NO: 1064990 - DNA, 33 bp, Homo sapien
gctgactgtacgttgctatttactatagtcaca

SEQ ID NO: 1064991 - DNA, 33 bp, Homo sapien
atggtccatgtggctaccatgcagagtaagaaa

SEQ ID NO: 1064992 - DNA, 33 bp, Homo sapien
atggtccatgtggctatcatgcagagtaagaaa

SEQ ID NO: 1064993 - DNA, 33 bp, Homo sapien
ataataccatcgttgtcaaagggataattctca

SEQ ID NO: 1064994 - DNA, 33 bp, Homo sapien
ataataccatcgttgttaaagggataattctca

SEQ ID NO: 1064995 - DNA, 33 bp, Homo sapien
tatgtagatgaggacactcaggcttagaaaagt

SEQ ID NO: 1064996 - DNA, 33 bp, Homo sapien
tatgtagatgaggacattcaggcttagaaaagt

SEQ ID NO: 1064997 - DNA, 33 bp, Homo sapien
ttctggcctgtactagacactcagcaaaaattt

SEQ ID NO: 1064998 - DNA, 33 bp, Homo sapien
ttctggcctgtactaggcactcagcaaaaattt

SEQ ID NO: 1064999 - DNA, 33 bp, Homo sapien
acacataaagtgttcagatccttagcctattcc

SEQ ID NO: 1065000 - DNA, 33 bp, Homo sapien
acacataaagtgttcatatccttagcctattcc

SEQ ID NO: 1065001 - DNA, 33 bp, Homo sapien
tccattaacattcagcagatctactcctctgtt

SEQ ID NO: 1065002 - DNA, 33 bp, Homo sapien
tccattaacattcagcggatctactcctctgtt

SEQ ID NO: 1065003 - DNA, 33 bp, Homo sapien
tccatcctctagtagtcaaaaagaattttttat

SEQ ID NO: 1065004 - DNA, 33 bp, Homo sapien
tccatcctctagtagtgaaaaagaattttttat

SEQ ID NO: 1065005 - DNA, 33 bp, Homo sapien
aataaatataaaaaacacaataggacaataaga

SEQ ID NO: 1065006 - DNA, 33 bp, Homo sapien
aataaatataaaaaacccaataggacaataaga

SEQ ID NO: 1065007 - DNA, 33 bp, Homo sapien
aaaaattgtcttcctgaaaaccggtcttggtcc

SEQ ID NO: 1065008 - DNA, 33 bp, Homo sapien
aaaaattgtcttcctgcaaaccggtcttggtcc

SEQ ID NO: 1065009 - DNA, 33 bp, Homo sapien
atgagatcaaagtttacaactcccacaaataag

SEQ ID NO: 1065010 - DNA, 33 bp, Homo sapien
atgagatcaaagtttataactcccacaaataag

SEQ ID NO: 1065011 - DNA, 33 bp, Homo sapien
atcagatgaaagtacaagttttagacattggga

SEQ ID NO: 1065012 - DNA, 33 bp, Homo sapien
atcagatgaaagtacaggttttagacattggga

SEQ ID NO: 1065013 - DNA, 33 bp, Homo sapien
tatgttatgttctgtaacttgcttatatatttc

SEQ ID NO: 1065014 - DNA, 33 bp, Homo sapien
tatgttatgttctgtatcttgcttatatatttc

SEQ ID NO: 1065015 - DNA, 33 bp, Homo sapien
ccagggcacagctgcaaccaaacaaacaacagc

SEQ ID NO: 1065016 - DNA, 33 bp, Homo sapien
ccagggcacagctgcagccaaacaaacaacagc

SEQ ID NO: 1065017 - DNA, 33 bp, Homo sapien
ccttgagaaaatgttacaggaactgctactaga

SEQ ID NO: 1065018 - DNA, 33 bp, Homo sapien
ccttgagaaaatgttataggaactgctactaga

SEQ ID NO: 1065019 - DNA, 33 bp, Homo sapien
ctgaggtgttaagcaaagcttttgtgaaaacag

SEQ ID NO: 1065020 - DNA, 33 bp, Homo sapien
ctgaggtgttaagcaaggcttttgtgaaaacag

SEQ ID NO: 1065021 - DNA, 33 bp, Homo sapien
atgggggaagttgggacctcagaagagtgagta

SEQ ID NO: 1065022 - DNA, 33 bp, Homo sapien
atgggggaagttgggatctcagaagagtgagta

SEQ ID NO: 1065023 - DNA, 33 bp, Homo sapien
tgcgacagagcccactcaaagtctggtggccaa

SEQ ID NO: 1065024 - DNA, 33 bp, Homo sapien
tgcgacagagcccacttaaagtctggtggccaa

SEQ ID NO: 1065025 - DNA, 33 bp, Homo sapien
ttttttagagattaaaatagccatccacctaga

SEQ ID NO: 1065026 - DNA, 33 bp, Homo sapien
ttttttagagattaaagtagccatccacctaga

SEQ ID NO: 1065027 - DNA, 33 bp, Homo sapien
aaaacatacttagtaaaaatgatataaccacat

SEQ ID NO: 1065028 - DNA, 33 bp, Homo sapien
aaaacatacttagtaagaatgatataaccacat

SEQ ID NO: 1065029 - DNA, 33 bp, Homo sapien
gctagttgatttttaagaaatgttgtgacctct

SEQ ID NO: 1065030 - DNA, 33 bp, Homo sapien
gctagttgatttttaataaatgttgtgacctct

SEQ ID NO: 1065031 - DNA, 33 bp, Homo sapien
ccctgagccagaaagggattccctgacttgaag

SEQ ID NO: 1065032 - DNA, 33 bp, Homo sapien
ccctgagccagaaaggtattccctgacttgaag

SEQ ID NO: 1065033 - DNA, 33 bp, Homo sapien
aggggatccagacttccaatttatcaacactgt

SEQ ID NO: 1065034 - DNA, 33 bp, Homo sapien
aggggatccagacttctaatttatcaacactgt

SEQ ID NO: 1065035 - DNA, 33 bp, Homo sapien
cagttaacatccacaaacagtaatgaacaacac

SEQ ID NO: 1065036 - DNA, 33 bp, Homo sapien
cagttaacatccacaagcagtaatgaacaacac

SEQ ID NO: 1065037 - DNA, 33 bp, Homo sapien
tattggaccttatgacaatctctggtataacag

SEQ ID NO: 1065038 - DNA, 33 bp, Homo sapien
tattggaccttatgaccatctctggtataacag

SEQ ID NO: 1065039 - DNA, 33 bp, Homo sapien
tgatcaaaggaagatgcattacttacacaggca

SEQ ID NO: 1065040 - DNA, 33 bp, Homo sapien
tgatcaaaggaagatgtattacttacacaggca

SEQ ID NO: 1065041 - DNA, 33 bp, Homo sapien
aggatgacctatcccaatcgcttttgttgtgat

SEQ ID NO: 1065042 - DNA, 33 bp, Homo sapien
aggatgacctatcccagtcgcttttgttgtgat

SEQ ID NO: 1065043 - DNA, 33 bp, Homo sapien
aatgacatagaaaggaacctgaatatagtagat

SEQ ID NO: 1065044 - DNA, 33 bp, Homo sapien
aatgacatagaaaggagcctgaatatagtagat

SEQ ID NO: 1065045 - DNA, 33 bp, Homo sapien
gtaaatacgtattgaaggagtggataaatttgc

SEQ ID NO: 1065046 - DNA, 33 bp, Homo sapien
gtaaatacgtattgaatgagtggataaatttgc

SEQ ID NO: 1065047 - DNA, 33 bp, Homo sapien
gtcatttgataacagccgaggactcaaggacaa

SEQ ID NO: 1065048 - DNA, 33 bp, Homo sapien
gtcatttgataacagctgaggactcaaggacaa

SEQ ID NO: 1065049 - DNA, 33 bp, Homo sapien
ggcaagatttcctggcaaaaggattaaactatt

SEQ ID NO: 1065050 - DNA, 33 bp, Homo sapien
ggcaagatttcctggcgaaaggattaaactatt

SEQ ID NO: 1065051 - DNA, 33 bp, Homo sapien
tatatgaggcattataagagctgtagggaagaa

SEQ ID NO: 1065052 - DNA, 33 bp, Homo sapien
tatatgaggcattataggagctgtagggaagaa

SEQ ID NO: 1065053 - DNA, 33 bp, Homo sapien
aaaagcattattctgagtaaaagtagccagcca

SEQ ID NO: 1065054 - DNA, 33 bp, Homo sapien
aaaagcattattctgattaaaagtagccagcca

SEQ ID NO: 1065055 - DNA, 33 bp, Homo sapien
ctactgattactgatagctaggctgttttcagc

SEQ ID NO: 1065056 - DNA, 33 bp, Homo sapien
ctactgattactgatatctaggctgttttcagc

SEQ ID NO: 1065057 - DNA, 33 bp, Homo sapien
ccccatacaagagtgcccagaaagcattaagat

SEQ ID NO: 1065058 - DNA, 33 bp, Homo sapien
ccccatacaagagtgctcagaaagcattaagat

SEQ ID NO: 1065059 - DNA, 33 bp, Homo sapien
acgtttgcacacaaacagaacacttatacatga

SEQ ID NO: 1065060 - DNA, 33 bp, Homo sapien
acgtttgcacacaaaccgaacacttatacatga

SEQ ID NO: 1065061 - DNA, 33 bp, Homo sapien
aagatgcaacttcccaagattgaaccaggaaga

SEQ ID NO: 1065062 - DNA, 33 bp, Homo sapien
aagatgcaacttcccatgattgaaccaggaaga

SEQ ID NO: 1065063 - DNA, 33 bp, Homo sapien
cctctttagattatcaaagatcaaaaggagcag

SEQ ID NO: 1065064 - DNA, 33 bp, Homo sapien
cctctttagattatcatagatcaaaaggagcag

SEQ ID NO: 1065065 - DNA, 33 bp, Homo sapien
ccaggacacacacaagccatctaggagcctgag

SEQ ID NO: 1065066 - DNA, 33 bp, Homo sapien
ccaggacacacacaaggcatctaggagcctgag

SEQ ID NO: 1065067 - DNA, 33 bp, Homo sapien
atccacacaaccatagaaaaacctgacaacagg

SEQ ID NO: 1065068 - DNA, 33 bp, Homo sapien
atccacacaaccataggaaaacctgacaacagg

SEQ ID NO: 1065069 - DNA, 33 bp, Homo sapien
agtggagtgcatagcaactgcaatgtcagtagt

SEQ ID NO: 1065070 - DNA, 33 bp, Homo sapien
agtggagtgcatagcacctgcaatgtcagtagt

SEQ ID NO: 1065071 - DNA, 33 bp, Homo sapien
agtaaggaaaagtgagaatcaagatatgcgtag

SEQ ID NO: 1065072 - DNA, 33 bp, Homo sapien
agtaaggaaaagtgaggatcaagatatgcgtag

SEQ ID NO: 1065073 - DNA, 33 bp, Homo sapien
acaggttttcttatacacaattagccctatcac

SEQ ID NO: 1065074 - DNA, 33 bp, Homo sapien
acaggttttcttatactcaattagccctatcac

SEQ ID NO: 1065075 - DNA, 33 bp, Homo sapien
tccatgggccaagaagaagaggtgaagctttta

SEQ ID NO: 1065076 - DNA, 33 bp, Homo sapien
tccatgggccaagaagcagaggtgaagctttta

SEQ ID NO: 1065077 - DNA, 33 bp, Homo sapien
tgtgtacatgttaataacctatgattcaggttc

SEQ ID NO: 1065078 - DNA, 33 bp, Homo sapien
tgtgtacatgttaatagcctatgattcaggttc

SEQ ID NO: 1065079 - DNA, 33 bp, Homo sapien
tccatgttgctgcctacggacttttctgtttta

SEQ ID NO: 1065080 - DNA, 33 bp, Homo sapien
tccatgttgctgcctatggacttttctgtttta

SEQ ID NO: 1065081 - DNA, 33 bp, Homo sapien
gattaaaacacatcaaatgcataaggatttatg

SEQ ID NO: 1065082 - DNA, 33 bp, Homo sapien
gattaaaacacatcaagtgcataaggatttatg

SEQ ID NO: 1065083 - DNA, 33 bp, Homo sapien
aactatgggttgtttcccttgagcctccaaagg

SEQ ID NO: 1065084 - DNA, 33 bp, Homo sapien
aactatgggttgtttctcttgagcctccaaagg

SEQ ID NO: 1065085 - DNA, 33 bp, Homo sapien
aaagaagtaatagtaccgacctcaaagcattgc

SEQ ID NO: 1065086 - DNA, 33 bp, Homo sapien
aaagaagtaatagtactgacctcaaagcattgc

SEQ ID NO: 1065087 - DNA, 33 bp, Homo sapien
attttgttcttactggaattgacacttattctg

SEQ ID NO: 1065088 - DNA, 33 bp, Homo sapien
attttgttcttactggtattgacacttattctg

SEQ ID NO: 1065089 - DNA, 33 bp, Homo sapien
taggtttaatggactaacagatttgtatggctg

SEQ ID NO: 1065090 - DNA, 33 bp, Homo sapien
taggtttaatggactaccagatttgtatggctg

SEQ ID NO: 1065091 - DNA, 33 bp, Homo sapien
aaggggcttcatttgggagagtgcagagagaag

SEQ ID NO: 1065092 - DNA, 33 bp, Homo sapien
aaggggcttcatttggtagagtgcagagagaag

SEQ ID NO: 1065093 - DNA, 33 bp, Homo sapien
caccaaaagcgattacaacaaaaccaaaaacag

SEQ ID NO: 1065094 - DNA, 33 bp, Homo sapien
caccaaaagcgattacgacaaaaccaaaaacag

SEQ ID NO: 1065095 - DNA, 33 bp, Homo sapien
aaatcttgtagcagttaaaacatagtttactct

SEQ ID NO: 1065096 - DNA, 33 bp, Homo sapien
aaatcttgtagcagttcaaacatagtttactct

SEQ ID NO: 1065097 - DNA, 33 bp, Homo sapien
ttatcgtagaataaaaacgtgttatataacaag

SEQ ID NO: 1065098 - DNA, 33 bp, Homo sapien
ttatcgtagaataaaagcgtgttatataacaag

SEQ ID NO: 1065099 - DNA, 33 bp, Homo sapien
aaatagcaaaacagcaaatgtaaatatcacctt

SEQ ID NO: 1065100 - DNA, 33 bp, Homo sapien
aaatagcaaaacagcagatgtaaatatcacctt

SEQ ID NO: 1065101 - DNA, 33 bp, Homo sapien
aacttattctcttacaatgctagaagtaagaaa

SEQ ID NO: 1065102 - DNA, 33 bp, Homo sapien
aacttattctcttacagtgctagaagtaagaaa

SEQ ID NO: 1065103 - DNA, 33 bp, Homo sapien
ttttctgtttttgaagcatttgcatgtacataa

SEQ ID NO: 1065104 - DNA, 33 bp, Homo sapien
ttttctgtttttgaagtatttgcatgtacataa

SEQ ID NO: 1065105 - DNA, 33 bp, Homo sapien
gatatccaggaatcgccgcacaagaaggggaat

SEQ ID NO: 1065106 - DNA, 33 bp, Homo sapien
gatatccaggaatcgctgcacaagaaggggaat

SEQ ID NO: 1065107 - DNA, 33 bp, Homo sapien
atctatgaatcttacccggagataaattcctca

SEQ ID NO: 1065108 - DNA, 33 bp, Homo sapien
atctatgaatcttacctggagataaattcctca

SEQ ID NO: 1065109 - DNA, 33 bp, Homo sapien
ctgggccagtgaaatacactcattgttacccgc

SEQ ID NO: 1065110 - DNA, 33 bp, Homo sapien
ctgggccagtgaaatatactcattgttacccgc

SEQ ID NO: 1065111 - DNA, 33 bp, Homo sapien
gtttacccaaatgagcagagaggtcagtgaata

SEQ ID NO: 1065112 - DNA, 33 bp, Homo sapien
gtttacccaaatgagcggagaggtcagtgaata

SEQ ID NO: 1065113 - DNA, 33 bp, Homo sapien
ttgttaaacttagtgacggagattggcaccttg

SEQ ID NO: 1065114 - DNA, 33 bp, Homo sapien
ttgttaaacttagtgagggagattggcaccttg

SEQ ID NO: 1065115 - DNA, 33 bp, Homo sapien
actaaactcaccaatcaaaagacatagagtggc

SEQ ID NO: 1065116 - DNA, 33 bp, Homo sapien
actaaactcaccaatcgaaagacatagagtggc

SEQ ID NO: 1065117 - DNA, 33 bp, Homo sapien
aaattctcaatctaagccatctttaattttttc

SEQ ID NO: 1065118 - DNA, 33 bp, Homo sapien
aaattctcaatctaagtcatctttaattttttc

SEQ ID NO: 1065119 - DNA, 33 bp, Homo sapien
tctacttttctgtctacggtgtgttgaaagaag

SEQ ID NO: 1065120 - DNA, 33 bp, Homo sapien
tctacttttctgtctatggtgtgttgaaagaag

SEQ ID NO: 1065121 - DNA, 33 bp, Homo sapien
cacagctaattagtaactattgtggccaaaaag

SEQ ID NO: 1065122 - DNA, 33 bp, Homo sapien
cacagctaattagtaagtattgtggccaaaaag

SEQ ID NO: 1065123 - DNA, 33 bp, Homo sapien
ccaatgccacttcggaatcccaatgtaaactat

SEQ ID NO: 1065124 - DNA, 33 bp, Homo sapien
ccaatgccacttcggagtcccaatgtaaactat

SEQ ID NO: 1065125 - DNA, 33 bp, Homo sapien
tctaaacacaatggtccatatctacaaacagtt

SEQ ID NO: 1065126 - DNA, 33 bp, Homo sapien
tctaaacacaatggtctatatctacaaacagtt

SEQ ID NO: 1065127 - DNA, 33 bp, Homo sapien
cagacggtcccaggaacatctgtcaatgttgag

SEQ ID NO: 1065128 - DNA, 33 bp, Homo sapien
cagacggtcccaggaatatctgtcaatgttgag

SEQ ID NO: 1065129 - DNA, 33 bp, Homo sapien
gacatcccaggaacacaaagaataagttcacct

SEQ ID NO: 1065130 - DNA, 33 bp, Homo sapien
gacatcccaggaacaccaagaataagttcacct

SEQ ID NO: 1065131 - DNA, 33 bp, Homo sapien
cttggtactattctctaaatttgaagtaatgtc

SEQ ID NO: 1065132 - DNA, 33 bp, Homo sapien
cttggtactattctctgaatttgaagtaatgtc

SEQ ID NO: 1065133 - DNA, 33 bp, Homo sapien
ctgcggcatatccagaaaatggaatactatcca

SEQ ID NO: 1065134 - DNA, 33 bp, Homo sapien
ctgcggcatatccagacaatggaatactatcca

SEQ ID NO: 1065135 - DNA, 33 bp, Homo sapien
tgctagatgtagttgagtaataccaataatgac

SEQ ID NO: 1065136 - DNA, 33 bp, Homo sapien
tgctagatgtagttgattaataccaataatgac

SEQ ID NO: 1065137 - DNA, 33 bp, Homo sapien
ggcatgtgtgcaagaacagtcatggcagcgtgg

SEQ ID NO: 1065138 - DNA, 33 bp, Homo sapien
ggcatgtgtgcaagaagagtcatggcagcgtgg

SEQ ID NO: 1065139 - DNA, 33 bp, Homo sapien
gaagtcacataggttacagaaagtagggcttgt

SEQ ID NO: 1065140 - DNA, 33 bp, Homo sapien
gaagtcacataggttatagaaagtagggcttgt

SEQ ID NO: 1065141 - DNA, 33 bp, Homo sapien
gagtaacaaatattacaagttttctgtggttgt

SEQ ID NO: 1065142 - DNA, 33 bp, Homo sapien
gagtaacaaatattacgagttttctgtggttgt

SEQ ID NO: 1065143 - DNA, 33 bp, Homo sapien
aaagaatcagatttggacaatcaacaaagtcat

SEQ ID NO: 1065144 - DNA, 33 bp, Homo sapien
aaagaatcagatttggtcaatcaacaaagtcat

SEQ ID NO: 1065145 - DNA, 33 bp, Homo sapien
gtgtactgttcaaaaactggtatttgggaataa

SEQ ID NO: 1065146 - DNA, 33 bp, Homo sapien
gtgtactgttcaaaaattggtatttgggaataa

SEQ ID NO: 1065147 - DNA, 33 bp, Homo sapien
taccaccccaaatacaaaatcatggatgcaact

SEQ ID NO: 1065148 - DNA, 33 bp, Homo sapien
taccaccccaaatacacaatcatggatgcaact

SEQ ID NO: 1065149 - DNA, 33 bp, Homo sapien
aatggttcatggatgacgaaatgcaaatggcca

SEQ ID NO: 1065150 - DNA, 33 bp, Homo sapien
aatggttcatggatgatgaaatgcaaatggcca

SEQ ID NO: 1065151 - DNA, 33 bp, Homo sapien
taattaataatcgaaacagtccagaaacatcta

SEQ ID NO: 1065152 - DNA, 33 bp, Homo sapien
taattaataatcgaaagagtccagaaacatcta

SEQ ID NO: 1065153 - DNA, 33 bp, Homo sapien
agattgcttttggcaacatggccattttaaaaa

SEQ ID NO: 1065154 - DNA, 33 bp, Homo sapien
agattgcttttggcaatatggccattttaaaaa

SEQ ID NO: 1065155 - DNA, 33 bp, Homo sapien
ggagagtaaaactatacggcatttcaccagaac

SEQ ID NO: 1065156 - DNA, 33 bp, Homo sapien
ggagagtaaaactatatggcatttcaccagaac

SEQ ID NO: 1065157 - DNA, 33 bp, Homo sapien
tcatacctctgatactaaaaacagagccctgct

SEQ ID NO: 1065158 - DNA, 33 bp, Homo sapien
tcatacctctgatactgaaaacagagccctgct

SEQ ID NO: 1065159 - DNA, 33 bp, Homo sapien
tctaaggactgaattaacattggactatcaatg

SEQ ID NO: 1065160 - DNA, 33 bp, Homo sapien
tctaaggactgaattagcattggactatcaatg

SEQ ID NO: 1065161 - DNA, 33 bp, Homo sapien
ttttttgaattattcaacatcctgagaacttca

SEQ ID NO: 1065162 - DNA, 33 bp, Homo sapien
ttttttgaattattcaccatcctgagaacttca

SEQ ID NO: 1065163 - DNA, 33 bp, Homo sapien
aattctggcattctgtcaactcagcttgttttc

SEQ ID NO: 1065164 - DNA, 33 bp, Homo sapien
aattctggcattctgtgaactcagcttgttttc

SEQ ID NO: 1065165 - DNA, 33 bp, Homo sapien
gatgctacctgggagccctaacagtaggttttc

SEQ ID NO: 1065166 - DNA, 33 bp, Homo sapien
gatgctacctgggagctctaacagtaggttttc

SEQ ID NO: 1065167 - DNA, 33 bp, Homo sapien
attccttagaggcaaaattccctcagtttaggg

SEQ ID NO: 1065168 - DNA, 33 bp, Homo sapien
attccttagaggcaaatttccctcagtttaggg

SEQ ID NO: 1065169 - DNA, 33 bp, Homo sapien
tgcaagtttaggaaagaagatctgggaagaaag

SEQ ID NO: 1065170 - DNA, 33 bp, Homo sapien
tgcaagtttaggaaaggagatctgggaagaaag

SEQ ID NO: 1065171 - DNA, 33 bp, Homo sapien
ctcctgtctttaaggcgctcagtgtaatgagtg

SEQ ID NO: 1065172 - DNA, 33 bp, Homo sapien
ctcctgtctttaaggctctcagtgtaatgagtg

SEQ ID NO: 1065173 - DNA, 33 bp, Homo sapien
acaaccttgtacattacgcgtttatcaacattc

SEQ ID NO: 1065174 - DNA, 33 bp, Homo sapien
acaaccttgtacattatgcgtttatcaacattc

SEQ ID NO: 1065175 - DNA, 33 bp, Homo sapien
gtacacacaccattacaagatgataaagagcaa

SEQ ID NO: 1065176 - DNA, 33 bp, Homo sapien
gtacacacaccattacgagatgataaagagcaa

SEQ ID NO: 1065177 - DNA, 33 bp, Homo sapien
tgcattctggtatcaactgtaagtcaaatatcc

SEQ ID NO: 1065178 - DNA, 33 bp, Homo sapien
tgcattctggtatcaattgtaagtcaaatatcc

SEQ ID NO: 1065179 - DNA, 33 bp, Homo sapien
atggctggaatgtaccagccagtgaaatacata

SEQ ID NO: 1065180 - DNA, 33 bp, Homo sapien
atggctggaatgtaccggccagtgaaatacata

SEQ ID NO: 1065181 - DNA, 33 bp, Homo sapien
gcactggagatgaccaacaagctgagttttccg

SEQ ID NO: 1065182 - DNA, 33 bp, Homo sapien
gcactggagatgaccagcaagctgagttttccg

SEQ ID NO: 1065183 - DNA, 33 bp, Homo sapien
ttgctctgtttggatacgtctcatgtgttttct

SEQ ID NO: 1065184 - DNA, 33 bp, Homo sapien
ttgctctgtttggatatgtctcatgtgttttct

SEQ ID NO: 1065185 - DNA, 33 bp, Homo sapien
tctttacaatggtttccatttgaactcctcaga

SEQ ID NO: 1065186 - DNA, 33 bp, Homo sapien
tctttacaatggtttctatttgaactcctcaga

SEQ ID NO: 1065187 - DNA, 33 bp, Homo sapien
atccctccattttccaatcacccctgagtctca

SEQ ID NO: 1065188 - DNA, 33 bp, Homo sapien
atccctccattttccagtcacccctgagtctca

SEQ ID NO: 1065189 - DNA, 33 bp, Homo sapien
cagtttccaaggcacacaaacagggtcatagcc

SEQ ID NO: 1065190 - DNA, 33 bp, Homo sapien
cagtttccaaggcacagaaacagggtcatagcc

SEQ ID NO: 1065191 - DNA, 33 bp, Homo sapien
tctttctatttacgggacaatatcacattctta

SEQ ID NO: 1065192 - DNA, 33 bp, Homo sapien
tctttctatttacggggcaatatcacattctta

SEQ ID NO: 1065193 - DNA, 33 bp, Homo sapien
ggctcctgctcttctaactagacaacaatgatc

SEQ ID NO: 1065194 - DNA, 33 bp, Homo sapien
ggctcctgctcttctatctagacaacaatgatc

SEQ ID NO: 1065195 - DNA, 33 bp, Homo sapien
acaggagtaagcagaaaaagaaactaagtatgt

SEQ ID NO: 1065196 - DNA, 33 bp, Homo sapien
acaggagtaagcagaagaagaaactaagtatgt

SEQ ID NO: 1065197 - DNA, 33 bp, Homo sapien
atcccaaagaaatccacgaaaagacacatcatt

SEQ ID NO: 1065198 - DNA, 33 bp, Homo sapien
atcccaaagaaatccatgaaaagacacatcatt

SEQ ID NO: 1065199 - DNA, 33 bp, Homo sapien
caaaattggaatctataagtcatactgatataa

SEQ ID NO: 1065200 - DNA, 33 bp, Homo sapien
caaaattggaatctatgagtcatactgatataa

SEQ ID NO: 1065201 - DNA, 33 bp, Homo sapien
actggtaagtgtaaacaccaaaaggcttacaga

SEQ ID NO: 1065202 - DNA, 33 bp, Homo sapien
actggtaagtgtaaaccccaaaaggcttacaga

SEQ ID NO: 1065203 - DNA, 33 bp, Homo sapien
aatcttccagaacttaagaggagaaagactgac

SEQ ID NO: 1065204 - DNA, 33 bp, Homo sapien
aatcttccagaacttacgaggagaaagactgac

SEQ ID NO: 1065205 - DNA, 33 bp, Homo sapien
acaacacccatcagtaccctgtcgcagcagatg

SEQ ID NO: 1065206 - DNA, 33 bp, Homo sapien
acaacacccatcagtatcctgtcgcagcagatg

SEQ ID NO: 1065207 - DNA, 33 bp, Homo sapien
ggtgatccgtttgtgaacaagtgctgttttgtg

SEQ ID NO: 1065208 - DNA, 33 bp, Homo sapien
ggtgatccgtttgtgatcaagtgctgttttgtg

SEQ ID NO: 1065209 - DNA, 33 bp, Homo sapien
gactttagatttaggcaacttgggttcaattat

SEQ ID NO: 1065210 - DNA, 33 bp, Homo sapien
gactttagatttaggcgacttgggttcaattat

SEQ ID NO: 1065211 - DNA, 33 bp, Homo sapien
tcatatgccattgcaaagaaccctcaatatcaa

SEQ ID NO: 1065212 - DNA, 33 bp, Homo sapien
tcatatgccattgcaaggaaccctcaatatcaa

SEQ ID NO: 1065213 - DNA, 33 bp, Homo sapien
gacaatattaaagggccgcacatatataatgag

SEQ ID NO: 1065214 - DNA, 33 bp, Homo sapien
gacaatattaaagggctgcacatatataatgag

SEQ ID NO: 1065215 - DNA, 33 bp, Homo sapien
ttgagatacctcatgaaaagcttaataaaggtg

SEQ ID NO: 1065216 - DNA, 33 bp, Homo sapien
ttgagatacctcatgagaagcttaataaaggtg

SEQ ID NO: 1065217 - DNA, 33 bp, Homo sapien
gacctctcagactgccaaaggtaaaaatgtgta

SEQ ID NO: 1065218 - DNA, 33 bp, Homo sapien
gacctctcagactgcccaaggtaaaaatgtgta

SEQ ID NO: 1065219 - DNA, 33 bp, Homo sapien
aggttatcttatcgctcaaggttgcttgttgca

SEQ ID NO: 1065220 - DNA, 33 bp, Homo sapien
aggttatcttatcgcttaaggttgcttgttgca

SEQ ID NO: 1065221 - DNA, 33 bp, Homo sapien
tggagttcaaaagtccaaagtaggtctcactgg

SEQ ID NO: 1065222 - DNA, 33 bp, Homo sapien
tggagttcaaaagtccgaagtaggtctcactgg

SEQ ID NO: 1065223 - DNA, 33 bp, Homo sapien
tatgctttattgaagtaactctgtgcctgcaac

SEQ ID NO: 1065224 - DNA, 33 bp, Homo sapien
tatgctttattgaagtgactctgtgcctgcaac

SEQ ID NO: 1065225 - DNA, 33 bp, Homo sapien
aggaagaaagaccaacaggtacaccaaattatg

SEQ ID NO: 1065226 - DNA, 33 bp, Homo sapien
aggaagaaagaccaaccggtacaccaaattatg

SEQ ID NO: 1065227 - DNA, 33 bp, Homo sapien
ttcaactaatatcacaaagagatgttcttaatc

SEQ ID NO: 1065228 - DNA, 33 bp, Homo sapien
ttcaactaatatcacagagagatgttcttaatc

SEQ ID NO: 1065229 - DNA, 33 bp, Homo sapien
gatattccttgagttcaatgttttgtagacaga

SEQ ID NO: 1065230 - DNA, 33 bp, Homo sapien
gatattccttgagttcgatgttttgtagacaga

SEQ ID NO: 1065231 - DNA, 33 bp, Homo sapien
gcatgaaatgagttatcaaatgattccaagttc

SEQ ID NO: 1065232 - DNA, 33 bp, Homo sapien
gcatgaaatgagttattaaatgattccaagttc

SEQ ID NO: 1065233 - DNA, 33 bp, Homo sapien
gccaattcatgcggcccaacaaccaggtctctc

SEQ ID NO: 1065234 - DNA, 33 bp, Homo sapien
gccaattcatgcggcctaacaaccaggtctctc

SEQ ID NO: 1065235 - DNA, 33 bp, Homo sapien
ctccatgaccacagcccaggtgacagacaccac

SEQ ID NO: 1065236 - DNA, 33 bp, Homo sapien
ctccatgaccacagccgaggtgacagacaccac

SEQ ID NO: 1065237 - DNA, 33 bp, Homo sapien
ataatctattacaaaccagtatctatggaagat

SEQ ID NO: 1065238 - DNA, 33 bp, Homo sapien
ataatctattacaaactagtatctatggaagat

SEQ ID NO: 1065239 - DNA, 33 bp, Homo sapien
catgtaatctaatctaccagcatttgtctcttt

SEQ ID NO: 1065240 - DNA, 33 bp, Homo sapien
catgtaatctaatctatcagcatttgtctcttt

SEQ ID NO: 1065241 - DNA, 33 bp, Homo sapien
agatacgtctaaataacacagctcaaaaagagc

SEQ ID NO: 1065242 - DNA, 33 bp, Homo sapien
agatacgtctaaataatacagctcaaaaagagc

SEQ ID NO: 1065243 - DNA, 33 bp, Homo sapien
accgcaaatgtttataccttcagggtaattgta

SEQ ID NO: 1065244 - DNA, 33 bp, Homo sapien
accgcaaatgtttatatcttcagggtaattgta

SEQ ID NO: 1065245 - DNA, 33 bp, Homo sapien
aagccctaaggagacaacagccagagcagctag

SEQ ID NO: 1065246 - DNA, 33 bp, Homo sapien
aagccctaaggagacaccagccagagcagctag

SEQ ID NO: 1065247 - DNA, 33 bp, Homo sapien
tttaaagatatagtcactagttttgaccctctc

SEQ ID NO: 1065248 - DNA, 33 bp, Homo sapien
tttaaagatatagtcattagttttgaccctctc

SEQ ID NO: 1065249 - DNA, 33 bp, Homo sapien
caccatgcctgacaatcatacaactttttagct

SEQ ID NO: 1065250 - DNA, 33 bp, Homo sapien
caccatgcctgacaattatacaactttttagct

SEQ ID NO: 1065251 - DNA, 33 bp, Homo sapien
ctgaactggaaatcaaaggagaaaaccatttta

SEQ ID NO: 1065252 - DNA, 33 bp, Homo sapien
ctgaactggaaatcaagggagaaaaccatttta

SEQ ID NO: 1065253 - DNA, 33 bp, Homo sapien
tccctggcttactgagacccttgctctgagggg

SEQ ID NO: 1065254 - DNA, 33 bp, Homo sapien
tccctggcttactgagtcccttgctctgagggg

SEQ ID NO: 1065255 - DNA, 33 bp, Homo sapien
agtttgcgttaaggggaagaatttggatgaaga

SEQ ID NO: 1065256 - DNA, 33 bp, Homo sapien
agtttgcgttaaggggcagaatttggatgaaga

SEQ ID NO: 1065257 - DNA, 33 bp, Homo sapien
acagtggaatgacccacgcctgtcctaccgaga

SEQ ID NO: 1065258 - DNA, 33 bp, Homo sapien
acagtggaatgacccatgcctgtcctaccgaga

SEQ ID NO: 1065259 - DNA, 33 bp, Homo sapien
tgataagtgcagcacacaactggcctcagactt

SEQ ID NO: 1065260 - DNA, 33 bp, Homo sapien
tgataagtgcagcacataactggcctcagactt

SEQ ID NO: 1065261 - DNA, 33 bp, Homo sapien
acttaccaacttgccaactaacagataaactag

SEQ ID NO: 1065262 - DNA, 33 bp, Homo sapien
acttaccaacttgccagctaacagataaactag

SEQ ID NO: 1065263 - DNA, 33 bp, Homo sapien
ccaggtcatttccaaacggttttgtcttagagg

SEQ ID NO: 1065264 - DNA, 33 bp, Homo sapien
ccaggtcatttccaaatggttttgtcttagagg

SEQ ID NO: 1065265 - DNA, 33 bp, Homo sapien
gccaggagcctccagaagtgccattcagtctct

SEQ ID NO: 1065266 - DNA, 33 bp, Homo sapien
gccaggagcctccagaggtgccattcagtctct

SEQ ID NO: 1065267 - DNA, 33 bp, Homo sapien
attcctttagtgagtacctgagtcccagagtct

SEQ ID NO: 1065268 - DNA, 33 bp, Homo sapien
attcctttagtgagtagctgagtcccagagtct

SEQ ID NO: 1065269 - DNA, 33 bp, Homo sapien
aaagcatacttcttcaactctattaccaactgc

SEQ ID NO: 1065270 - DNA, 33 bp, Homo sapien
aaagcatacttcttcagctctattaccaactgc

SEQ ID NO: 1065271 - DNA, 33 bp, Homo sapien
agttgtcaattaaacaccaatttccacagttca

SEQ ID NO: 1065272 - DNA, 33 bp, Homo sapien
agttgtcaattaaacagcaatttccacagttca

SEQ ID NO: 1065273 - DNA, 33 bp, Homo sapien
ttactatagttatttacgtgaatctcttagctc

SEQ ID NO: 1065274 - DNA, 33 bp, Homo sapien
ttactatagttatttatgtgaatctcttagctc

SEQ ID NO: 1065275 - DNA, 33 bp, Homo sapien
cctgctactctaaagtcactaaacctaggtaat

SEQ ID NO: 1065276 - DNA, 33 bp, Homo sapien
cctgctactctaaagttactaaacctaggtaat

SEQ ID NO: 1065277 - DNA, 33 bp, Homo sapien
atcatatccaaaccgaggcatcctgggtcacct

SEQ ID NO: 1065278 - DNA, 33 bp, Homo sapien
atcatatccaaaccgatgcatcctgggtcacct

SEQ ID NO: 1065279 - DNA, 33 bp, Homo sapien
ttgagggcaggcaccaaattctattcactctag

SEQ ID NO: 1065280 - DNA, 33 bp, Homo sapien
ttgagggcaggcaccagattctattcactctag

SEQ ID NO: 1065281 - DNA, 33 bp, Homo sapien
gttaataacaaaactcacttagaatgctggtat

SEQ ID NO: 1065282 - DNA, 33 bp, Homo sapien
gttaataacaaaactcgcttagaatgctggtat

SEQ ID NO: 1065283 - DNA, 33 bp, Homo sapien
aatacctaacgttgaccagtttattataaagga

SEQ ID NO: 1065284 - DNA, 33 bp, Homo sapien
aatacctaacgttgactagtttattataaagga

SEQ ID NO: 1065285 - DNA, 33 bp, Homo sapien
aaatcttcaccctcataatcccaaggagagtcc

SEQ ID NO: 1065286 - DNA, 33 bp, Homo sapien
aaatcttcaccctcatgatcccaaggagagtcc

SEQ ID NO: 1065287 - DNA, 33 bp, Homo sapien
gatagtcctcaaaaatcaacgcctttctgtagt

SEQ ID NO: 1065288 - DNA, 33 bp, Homo sapien
gatagtcctcaaaaatgaacgcctttctgtagt

SEQ ID NO: 1065289 - DNA, 33 bp, Homo sapien
tgtaaaaaattctcagccaattaaattcctctc

SEQ ID NO: 1065290 - DNA, 33 bp, Homo sapien
tgtaaaaaattctcagtcaattaaattcctctc

SEQ ID NO: 1065291 - DNA, 33 bp, Homo sapien
ctcaaagtgtatgtcaaattttctagtttcagc

SEQ ID NO: 1065292 - DNA, 33 bp, Homo sapien
ctcaaagtgtatgtcagattttctagtttcagc

SEQ ID NO: 1065293 - DNA, 33 bp, Homo sapien
cagagcatgtgcataaaaagtggtcctttaact

SEQ ID NO: 1065294 - DNA, 33 bp, Homo sapien
cagagcatgtgcataagaagtggtcctttaact

SEQ ID NO: 1065295 - DNA, 33 bp, Homo sapien
tttgacacatggagaacggcggactttagcctg

SEQ ID NO: 1065296 - DNA, 33 bp, Homo sapien
tttgacacatggagaatggcggactttagcctg

SEQ ID NO: 1065297 - DNA, 33 bp, Homo sapien
tgggtcctcgagctcaagtaaggggatatagtc

SEQ ID NO: 1065298 - DNA, 33 bp, Homo sapien
tgggtcctcgagctcaggtaaggggatatagtc

SEQ ID NO: 1065299 - DNA, 33 bp, Homo sapien
aacatggcggcataaaaagcagaaatttattgg

SEQ ID NO: 1065300 - DNA, 33 bp, Homo sapien
aacatggcggcataaacagcagaaatttattgg

SEQ ID NO: 1065301 - DNA, 33 bp, Homo sapien
agctcatgatccctgaagagagacagacctcct

SEQ ID NO: 1065302 - DNA, 33 bp, Homo sapien
agctcatgatccctgaggagagacagacctcct

SEQ ID NO: 1065303 - DNA, 33 bp, Homo sapien
aatggaaatcgagagacaaaaatgattctctct

SEQ ID NO: 1065304 - DNA, 33 bp, Homo sapien
aatggaaatcgagagataaaaatgattctctct

SEQ ID NO: 1065305 - DNA, 33 bp, Homo sapien
caagaagacaacacgaagtaagttatattgcat

SEQ ID NO: 1065306 - DNA, 33 bp, Homo sapien
caagaagacaacacgatgtaagttatattgcat

SEQ ID NO: 1065307 - DNA, 33 bp, Homo sapien
gtggcgtgtttgcagaaggagactacgaagagg

SEQ ID NO: 1065308 - DNA, 33 bp, Homo sapien
gtggcgtgtttgcagacggagactacgaagagg

SEQ ID NO: 1065309 - DNA, 33 bp, Homo sapien
gtagcaatgagcatgacggaaattaagtgatgt

SEQ ID NO: 1065310 - DNA, 33 bp, Homo sapien
gtagcaatgagcatgatggaaattaagtgatgt

SEQ ID NO: 1065311 - DNA, 33 bp, Homo sapien; identical to SEQ ID NO: 1065309

SEQ ID NO: 1065312 - DNA, 33 bp, Homo sapien; identical to SEQ ID NO: 1065310

SEQ ID NO: 1065313 - DNA, 33 bp, Homo sapien
gactttagcactatgggaactgtctgacctgat

SEQ ID NO: 1065314 - DNA, 33 bp, Homo sapien
gactttagcactatggtaactgtctgacctgat

SEQ ID NO: 1065315 - DNA, 33 bp, Homo sapien
gatcactggttcaaacaaggcttcattttgctc

SEQ ID NO: 1065316 - DNA, 33 bp, Homo sapien
gatcactggttcaaacgaggcttcattttgctc

SEQ ID NO: 1065317 - DNA, 33 bp, Homo sapien
attgctcatcttttaacactaatgttatttctc

SEQ ID NO: 1065318 - DNA, 33 bp, Homo sapien
attgctcatcttttaagactaatgttatttctc

SEQ ID NO: 1065319 - DNA, 33 bp, Homo sapien
ctctgaggctactgaaactgtggagagactggg

SEQ ID NO: 1065320 - DNA, 33 bp, Homo sapien
ctctgaggctactgaagctgtggagagactggg

SEQ ID NO: 1065321 - DNA, 33 bp, Homo sapien
gacgtttagctgttcaatcttccttggtaatag

SEQ ID NO: 1065322 - DNA, 33 bp, Homo sapien
gacgtttagctgttcagtcttccttggtaatag

SEQ ID NO: 1065323 - DNA, 33 bp, Homo sapien
tgaatttcatgggcccacctaccatatcaaaac

SEQ ID NO: 1065324 - DNA, 33 bp, Homo sapien
tgaatttcatgggcccgcctaccatatcaaaac

SEQ ID NO: 1065325 - DNA, 33 bp, Homo sapien
ttgattctacttcctgaatgtcttttctttttc

SEQ ID NO: 1065326 - DNA, 33 bp, Homo sapien
ttgattctacttcctgcatgtcttttctttttc

SEQ ID NO: 1065327 - DNA, 33 bp, Homo sapien
tgatttctagcaacaaatcttcgtcagttgatg

SEQ ID NO: 1065328 - DNA, 33 bp, Homo sapien
tgatttctagcaacaagtcttcgtcagttgatg

SEQ ID NO: 1065329 - DNA, 33 bp, Homo sapien
gaaggcaattgatcacagcccaaagtgggtatt

SEQ ID NO: 1065330 - DNA, 33 bp, Homo sapien
gaaggcaattgatcacggcccaaagtgggtatt

SEQ ID NO: 1065331 - DNA, 33 bp, Homo sapien
agcccatcacaaaagactagatattgtatgact

SEQ ID NO: 1065332 - DNA, 33 bp, Homo sapien
agcccatcacaaaagattagatattgtatgact

SEQ ID NO: 1065333 - DNA, 33 bp, Homo sapien
tttttacaggattgccaaaatatgccagttttc

SEQ ID NO: 1065334 - DNA, 33 bp, Homo sapien
tttttacaggattgccgaaatatgccagttttc

SEQ ID NO: 1065335 - DNA, 33 bp, Homo sapien
tcactatgggtcagggaaattcacaaaagtcca

SEQ ID NO: 1065336 - DNA, 33 bp, Homo sapien
tcactatgggtcagggcaattcacaaaagtcca

SEQ ID NO: 1065337 - DNA, 33 bp, Homo sapien
tctagcagtccttaaaagcttcctggacagctc

SEQ ID NO: 1065338 - DNA, 33 bp, Homo sapien
tctagcagtccttaaaggcttcctggacagctc

SEQ ID NO: 1065339 - DNA, 33 bp, Homo sapien
gaaagcatgataaagacccacttggagaaaagg

SEQ ID NO: 1065340 - DNA, 33 bp, Homo sapien
gaaagcatgataaagatccacttggagaaaagg

SEQ ID NO: 1065341 - DNA, 33 bp, Homo sapien
actttgcaacttagaaattaaaactgaagtttt

SEQ ID NO: 1065342 - DNA, 33 bp, Homo sapien
actttgcaacttagaagttaaaactgaagtttt

SEQ ID NO: 1065343 - DNA, 33 bp, Homo sapien
gtttctagctccttgacccacactgtgattccc

SEQ ID NO: 1065344 - DNA, 33 bp, Homo sapien
gtttctagctccttgatccacactgtgattccc

SEQ ID NO: 1065345 - DNA, 33 bp, Homo sapien
tttcatagcacttcatcactgactgttggagtt

SEQ ID NO: 1065346 - DNA, 33 bp, Homo sapien
tttcatagcacttcattactgactgttggagtt

SEQ ID NO: 1065347 - DNA, 33 bp, Homo sapien
aaggagatagaaatgcgatgaggttgaggttgt

SEQ ID NO: 1065348 - DNA, 33 bp, Homo sapien
aaggagatagaaatgctatgaggttgaggttgt

SEQ ID NO: 1065349 - DNA, 33 bp, Homo sapien
atccaagcaaccaccaaaaatacttatctcaaa

SEQ ID NO: 1065350 - DNA, 33 bp, Homo sapien
atccaagcaaccaccagaaatacttatctcaaa

SEQ ID NO: 1065351 - DNA, 33 bp, Homo sapien
gcacaaccacttcacacgcgttagtgtcgctat

SEQ ID NO: 1065352 - DNA, 33 bp, Homo sapien
gcacaaccacttcacaggcgttagtgtcgctat

SEQ ID NO: 1065353 - DNA, 33 bp, Homo sapien
ctcaatttcactggtaaacttttgagaccttct

SEQ ID NO: 1065354 - DNA, 33 bp, Homo sapien
ctcaatttcactggtagacttttgagaccttct

SEQ ID NO: 1065355 - DNA, 33 bp, Homo sapien
ggacaagcttgcctaaaggatcaacaaacaagc

SEQ ID NO: 1065356 - DNA, 33 bp, Homo sapien
ggacaagcttgcctaagggatcaacaaacaagc

SEQ ID NO: 1065357 - DNA, 33 bp, Homo sapien
atatctattcagggtgaatgtaaagtggctgcc

SEQ ID NO: 1065358 - DNA, 33 bp, Homo sapien
atatctattcagggtgtatgtaaagtggctgcc

SEQ ID NO: 1065359 - DNA, 33 bp, Homo sapien
tacttatcatttcttcacataaattcaactatc

SEQ ID NO: 1065360 - DNA, 33 bp, Homo sapien
tacttatcatttcttcgcataaattcaactatc

SEQ ID NO: 1065361 - DNA, 33 bp, Homo sapien
ggctgtattaatggctaaaaagttatcagagct

SEQ ID NO: 1065362 - DNA, 33 bp, Homo sapien
ggctgtattaatggctgaaaagttatcagagct

SEQ ID NO: 1065363 - DNA, 33 bp, Homo sapien
ttaggagtatcttgtcaccgaatgaggaagcgg

SEQ ID NO: 1065364 - DNA, 33 bp, Homo sapien
ttaggagtatcttgtccccgaatgaggaagcgg

SEQ ID NO: 1065365 - DNA, 33 bp, Homo sapien
tagctttggccagatggatccatgtgttacatc

SEQ ID NO: 1065366 - DNA, 33 bp, Homo sapien
tagctttggccagatgtatccatgtgttacatc

SEQ ID NO: 1065367 - DNA, 33 bp, Homo sapien
cagtctcgctctaaaacccatgcatttaaacgt

SEQ ID NO: 1065368 - DNA, 33 bp, Homo sapien
cagtctcgctctaaaatccatgcatttaaacgt

SEQ ID NO: 1065369 - DNA, 33 bp, Homo sapien
gatccatcacagggacaaaagaatgagaaggtg

SEQ ID NO: 1065370 - DNA, 33 bp, Homo sapien
gatccatcacagggacgaaagaatgagaaggtg

SEQ ID NO: 1065371 - DNA, 33 bp, Homo sapien
gtttgttatgtttatcactactaatgtgttgct

SEQ ID NO: 1065372 - DNA, 33 bp, Homo sapien
gtttgttatgtttatcgctactaatgtgttgct

SEQ ID NO: 1065373 - DNA, 33 bp, Homo sapien
ccatcttgtttttggaagttgtatcagtcaggg

SEQ ID NO: 1065374 - DNA, 33 bp, Homo sapien
ccatcttgtttttggaggttgtatcagtcaggg

SEQ ID NO: 1065375 - DNA, 33 bp, Homo sapien
gttgctatggaggtaaagaccatgaagctgtga

SEQ ID NO: 1065376 - DNA, 33 bp, Homo sapien
gttgctatggaggtaatgaccatgaagctgtga

SEQ ID NO: 1065377 - DNA, 33 bp, Homo sapien
tatttatgttcacctactacttcaaattatggt

SEQ ID NO: 1065378 - DNA, 33 bp, Homo sapien
tatttatgttcacctattacttcaaattatggt

SEQ ID NO: 1065379 - DNA, 33 bp, Homo sapien
accaaaataataatgaacttagttgttaactca

SEQ ID NO: 1065380 - DNA, 33 bp, Homo sapien
accaaaataataatgagcttagttgttaactca

SEQ ID NO: 1065381 - DNA, 33 bp, Homo sapien
catgccattcatcttaagggtttaatgggtgcc

SEQ ID NO: 1065382 - DNA, 33 bp, Homo sapien
catgccattcatcttatgggtttaatgggtgcc

SEQ ID NO: 1065383 - DNA, 33 bp, Homo sapien
agagtcctgctcttaaacactcgtccatgttgt

SEQ ID NO: 1065384 - DNA, 33 bp, Homo sapien
agagtcctgctcttaatcactcgtccatgttgt

SEQ ID NO: 1065385 - DNA, 33 bp, Homo sapien
acaataggtgctacacaaaacagaagattctat

SEQ ID NO: 1065386 - DNA, 33 bp, Homo sapien
acaataggtgctacacgaaacagaagattctat

SEQ ID NO: 1065387 - DNA, 33 bp, Homo sapien
tttttggaacatttcaatatgaacatcttcagc

SEQ ID NO: 1065388 - DNA, 33 bp, Homo sapien
tttttggaacatttcagtatgaacatcttcagc

SEQ ID NO: 1065389 - DNA, 33 bp, Homo sapien
atttgtaattggttaacgtccaggggtagagca

SEQ ID NO: 1065390 - DNA, 33 bp, Homo sapien
atttgtaattggttaatgtccaggggtagagca

SEQ ID NO: 1065391 - DNA, 33 bp, Homo sapien
ttgaaaagaagcactcagagtaaagagagtaaa

SEQ ID NO: 1065392 - DNA, 33 bp, Homo sapien
ttgaaaagaagcactcggagtaaagagagtaaa

SEQ ID NO: 1065393 - DNA, 33 bp, Homo sapien
caccttcactattaaacagctgagtcatttagc

SEQ ID NO: 1065394 - DNA, 33 bp, Homo sapien
caccttcactattaaagagctgagtcatttagc

SEQ ID NO: 1065395 - DNA, 33 bp, Homo sapien
aaatcacatttgcagaagtcaatccttcaccat

SEQ ID NO: 1065396 - DNA, 33 bp, Homo sapien
aaatcacatttgcagaggtcaatccttcaccat

SEQ ID NO: 1065397 - DNA, 33 bp, Homo sapien
cacattacattccttcgaaacaacacatttcct

SEQ ID NO: 1065398 - DNA, 33 bp, Homo sapien
cacattacattccttctaaacaacacatttcct

SEQ ID NO: 1065399 - DNA, 33 bp, Homo sapien
ggccatccatcaggtgcaatatcaggtgctgat

SEQ ID NO: 1065400 - DNA, 33 bp, Homo sapien
ggccatccatcaggtgtaatatcaggtgctgat

SEQ ID NO: 1065401 - DNA, 33 bp, Homo sapien
ggagactgtttgtacccggaagacgatgcaaac

SEQ ID NO: 1065402 - DNA, 33 bp, Homo sapien
ggagactgtttgtacctggaagacgatgcaaac

SEQ ID NO: 1065403 - DNA, 33 bp, Homo sapien
atatcactagctgcagaccttcaggagagtttc

SEQ ID NO: 1065404 - DNA, 33 bp, Homo sapien
atatcactagctgcaggccttcaggagagtttc

SEQ ID NO: 1065405 - DNA, 33 bp, Homo sapien
caataattcctaggaaacttgcctaatataatc

SEQ ID NO: 1065406 - DNA, 33 bp, Homo sapien
caataattcctaggaaccttgcctaatataatc

SEQ ID NO: 1065407 - DNA, 33 bp, Homo sapien
gctacttagactgagtaaaagtattgctgaata

SEQ ID NO: 1065408 - DNA, 33 bp, Homo sapien
gctacttagactgagtgaaagtattgctgaata

SEQ ID NO: 1065409 - DNA, 33 bp, Homo sapien
ttttctctgcctaaaacgtccagtgtatacatc

SEQ ID NO: 1065410 - DNA, 33 bp, Homo sapien
ttttctctgcctaaaatgtccagtgtatacatc

SEQ ID NO: 1065411 - DNA, 33 bp, Homo sapien
tgaccttgctttagcacacaatttagcactcta

SEQ ID NO: 1065412 - DNA, 33 bp, Homo sapien
tgaccttgctttagcagacaatttagcactcta

SEQ ID NO: 1065413 - DNA, 33 bp, Homo sapien
tgtgttaatgtaaccccattggtccatcataac

SEQ ID NO: 1065414 - DNA, 33 bp, Homo sapien
tgtgttaatgtaaccctattggtccatcataac

SEQ ID NO: 1065415 - DNA, 33 bp, Homo sapien
ggatactacattagacaactcttatgctacact

SEQ ID NO: 1065416 - DNA, 33 bp, Homo sapien
ggatactacattagacgactcttatgctacact

SEQ ID NO: 1065417 - DNA, 33 bp, Homo sapien
aaatattgcttttttccctatatatgcttgagc

SEQ ID NO: 1065418 - DNA, 33 bp, Homo sapien
aaatattgcttttttctctatatatgcttgagc

SEQ ID NO: 1065419 - DNA, 33 bp, Homo sapien
gaaatcagataatatacggtgtaggttactggc

SEQ ID NO: 1065420 - DNA, 33 bp, Homo sapien
gaaatcagataatatatggtgtaggttactggc

SEQ ID NO: 1065421 - DNA, 33 bp, Homo sapien
tctgggttgctgcttacgtaattcatgtatatc

SEQ ID NO: 1065422 - DNA, 33 bp, Homo sapien
tctgggttgctgcttaggtaattcatgtatatc

SEQ ID NO: 1065423 - DNA, 33 bp, Homo sapien
ctaaaatagcttagtcaccatgaagagatatac

SEQ ID NO: 1065424 - DNA, 33 bp, Homo sapien
ctaaaatagcttagtcgccatgaagagatatac

SEQ ID NO: 1065425 - DNA, 33 bp, Homo sapien
agtatacgtcctgaaacagatgacaactttaag

SEQ ID NO: 1065426 - DNA, 33 bp, Homo sapien
agtatacgtcctgaaatagatgacaactttaag

SEQ ID NO: 1065427 - DNA, 33 bp, Homo sapien
atgttctcttaactcaataccatcaacttaaaa

SEQ ID NO: 1065428 - DNA, 33 bp, Homo sapien
atgttctcttaactcagtaccatcaacttaaaa

SEQ ID NO: 1065429 - DNA, 33 bp, Homo sapien
aaaatttccactaacactctacaaaatttatca

SEQ ID NO: 1065430 - DNA, 33 bp, Homo sapien
aaaatttccactaacagtctacaaaatttatca

SEQ ID NO: 1065431 - DNA, 33 bp, Homo sapien
tttgctctttcgctcactcctttgtggttaatt

SEQ ID NO: 1065432 - DNA, 33 bp, Homo sapien
tttgctctttcgctcattcctttgtggttaatt

SEQ ID NO: 1065433 - DNA, 33 bp, Homo sapien
ccaatatggctttctcagaattagcaggattaa

SEQ ID NO: 1065434 - DNA, 33 bp, Homo sapien
ccaatatggctttctcggaattagcaggattaa

SEQ ID NO: 1065435 - DNA, 33 bp, Homo sapien
gggagttaacttgtcaactaagatagagtttct

SEQ ID NO: 1065436 - DNA, 33 bp, Homo sapien
gggagttaacttgtcagctaagatagagtttct

SEQ ID NO: 1065437 - DNA, 33 bp, Homo sapien
caccgcacaaatgctacatcattctccttcatc

SEQ ID NO: 1065438 - DNA, 33 bp, Homo sapien
caccgcacaaatgctatatcattctccttcatc

SEQ ID NO: 1065439 - DNA, 33 bp, Homo sapien
tttgcttctgttgcaactgatacagggacaaat

SEQ ID NO: 1065440 - DNA, 33 bp, Homo sapien
tttgcttctgttgcaattgatacagggacaaat

SEQ ID NO: 1065441 - DNA, 33 bp, Homo sapien
ttctgcacagcggctcaatcctgcattctacaa

SEQ ID NO: 1065442 - DNA, 33 bp, Homo sapien
ttctgcacagcggctcgatcctgcattctacaa

SEQ ID NO: 1065443 - DNA, 33 bp, Homo sapien
aagattaagctgaatacgtaggtgggatgagaa

SEQ ID NO: 1065444 - DNA, 33 bp, Homo sapien
aagattaagctgaatatgtaggtgggatgagaa

SEQ ID NO: 1065445 - DNA, 33 bp, Homo sapien
tagtataggacttctacctcaagtgtaatctgt

SEQ ID NO: 1065446 - DNA, 33 bp, Homo sapien
tagtataggacttctatctcaagtgtaatctgt

SEQ ID NO: 1065447 - DNA, 33 bp, Homo sapien
attctcttttccctgaagttgctttcattttct

SEQ ID NO: 1065448 - DNA, 33 bp, Homo sapien
attctcttttccctgaggttgctttcattttct

SEQ ID NO: 1065449 - DNA, 33 bp, Homo sapien
gaggttgctggagaaacgaacagcacaaaacat

SEQ ID NO: 1065450 - DNA, 33 bp, Homo sapien
gaggttgctggagaaatgaacagcacaaaacat

SEQ ID NO: 1065451 - DNA, 33 bp, Homo sapien
ctgtgtttttttctcactcacttgaatttaaaa

SEQ ID NO: 1065452 - DNA, 33 bp, Homo sapien
ctgtgtttttttctcattcacttgaatttaaaa

SEQ ID NO: 1065453 - DNA, 33 bp, Homo sapien
tcctaacgatcttaaccaaagtgctaagagcta

SEQ ID NO: 1065454 - DNA, 33 bp, Homo sapien
tcctaacgatcttaactaaagtgctaagagcta

SEQ ID NO: 1065455 - DNA, 33 bp, Homo sapien
ccagaaattcccaccactagttatgcctatgag

SEQ ID NO: 1065456 - DNA, 33 bp, Homo sapien
ccagaaattcccaccattagttatgcctatgag

SEQ ID NO: 1065457 - DNA, 33 bp, Homo sapien
caagaacctgaacaagcaatgcagtataatgaa

SEQ ID NO: 1065458 - DNA, 33 bp, Homo sapien
caagaacctgaacaaggaatgcagtataatgaa

SEQ ID NO: 1065459 - DNA, 33 bp, Homo sapien
atttttaataaaagtaaggctgatttggtgcaa

SEQ ID NO: 1065460 - DNA, 33 bp, Homo sapien
atttttaataaaagtagggctgatttggtgcaa

SEQ ID NO: 1065461 - DNA, 33 bp, Homo sapien
tgtggctattcattgacactataacttaactca

SEQ ID NO: 1065462 - DNA, 33 bp, Homo sapien
tgtggctattcattgatactataacttaactca

SEQ ID NO: 1065463 - DNA, 33 bp, Homo sapien
agccattcggctcaaaagaagatgattgtcatc

SEQ ID NO: 1065464 - DNA, 33 bp, Homo sapien
agccattcggctcaaaggaagatgattgtcatc

SEQ ID NO: 1065465 - DNA, 33 bp, Homo sapien
acatatacatatttcacgttttccagccaggtt

SEQ ID NO: 1065466 - DNA, 33 bp, Homo sapien
acatatacatatttcatgttttccagccaggtt

SEQ ID NO: 1065467 - DNA, 33 bp, Homo sapien
tgccttgcttgatggacagtcagaatttcacta

SEQ ID NO: 1065468 - DNA, 33 bp, Homo sapien
tgccttgcttgatggagagtcagaatttcacta

SEQ ID NO: 1065469 - DNA, 33 bp, Homo sapien
tatactgggaatgctgcattacaaatgttaata

SEQ ID NO: 1065470 - DNA, 33 bp, Homo sapien
tatactgggaatgctgtattacaaatgttaata

SEQ ID NO: 1065471 - DNA, 33 bp, Homo sapien
taagtaactctcctaacgtctcatagctcaaat

SEQ ID NO: 1065472 - DNA, 33 bp, Homo sapien
taagtaactctcctaatgtctcatagctcaaat

SEQ ID NO: 1065473 - DNA, 33 bp, Homo sapien
aagagagaaggttattaaaaaaaatctggcttc

SEQ ID NO: 1065474 - DNA, 33 bp, Homo sapien
aagagagaaggttatttaaaaaaatctggcttc

SEQ ID NO: 1065475 - DNA, 33 bp, Homo sapien
cttcagtttttctgtgcagcaatgaagcctggc

SEQ ID NO: 1065476 - DNA, 33 bp, Homo sapien
cttcagtttttctgtgtagcaatgaagcctggc

SEQ ID NO: 1065477 - DNA, 33 bp, Homo sapien
aaatcttaatcttaaacactcagccaacattta

SEQ ID NO: 1065478 - DNA, 33 bp, Homo sapien
aaatcttaatcttaaatactcagccaacattta

SEQ ID NO: 1065479 - DNA, 33 bp, Homo sapien
atcagaggtcagatcacgttccccaaggcataa

SEQ ID NO: 1065480 - DNA, 33 bp, Homo sapien
atcagaggtcagatcatgttccccaaggcataa

SEQ ID NO: 1065481 - DNA, 33 bp, Homo sapien
atacttgtacatctgcacactttcggacaaaga

SEQ ID NO: 1065482 - DNA, 33 bp, Homo sapien
atacttgtacatctgcgcactttcggacaaaga

SEQ ID NO: 1065483 - DNA, 33 bp, Homo sapien
gaaataccttgtaatacctttcatgaaacaaaa

SEQ ID NO: 1065484 - DNA, 33 bp, Homo sapien
gaaataccttgtaatagctttcatgaaacaaaa

SEQ ID NO: 1065485 - DNA, 33 bp, Homo sapien
acaggatgaaatccaaactttatagtagggtag

SEQ ID NO: 1065486 - DNA, 33 bp, Homo sapien
acaggatgaaatccaagctttatagtagggtag

SEQ ID NO: 1065487 - DNA, 33 bp, Homo sapien
tgcagtggtgtaaggacggcccaatgcagcttc

SEQ ID NO: 1065488 - DNA, 33 bp, Homo sapien
tgcagtggtgtaaggatggcccaatgcagcttc

SEQ ID NO: 1065489 - DNA, 33 bp, Homo sapien
tacacaactttttcaccgagttgctaaaatatt

SEQ ID NO: 1065490 - DNA, 33 bp, Homo sapien
tacacaactttttcactgagttgctaaaatatt

SEQ ID NO: 1065491 - DNA, 33 bp, Homo sapien
tcagaagcctatatgcaagatacttatgaagta

SEQ ID NO: 1065492 - DNA, 33 bp, Homo sapien
tcagaagcctatatgcgagatacttatgaagta

SEQ ID NO: 1065493 - DNA, 33 bp, Homo sapien
cactgagataagatagacccaaaagcataaatg

SEQ ID NO: 1065494 - DNA, 33 bp, Homo sapien
cactgagataagataggcccaaaagcataaatg

SEQ ID NO: 1065495 - DNA, 33 bp, Homo sapien
tacaattatgaagcaactcgtggttatgtcttg

SEQ ID NO: 1065496 - DNA, 33 bp, Homo sapien
tacaattatgaagcaattcgtggttatgtcttg

SEQ ID NO: 1065497 - DNA, 33 bp, Homo sapien
gacagagacctggaaagactcactttgatctga

SEQ ID NO: 1065498 - DNA, 33 bp, Homo sapien
gacagagacctggaaatactcactttgatctga

SEQ ID NO: 1065499 - DNA, 33 bp, Homo sapien
gaaaaaaagaggtaaaatcaatgagtgacagac

SEQ ID NO: 1065500 - DNA, 33 bp, Homo sapien
gaaaaaaagaggtaaagtcaatgagtgacagac

SEQ ID NO: 1065501 - DNA, 33 bp, Homo sapien
actagtagtactcaaaagcactttagaagcact

SEQ ID NO: 1065502 - DNA, 33 bp, Homo sapien
actagtagtactcaaaggcactttagaagcact

SEQ ID NO: 1065503 - DNA, 33 bp, Homo sapien
gtcttcattcactgacaattttagttgagattt

SEQ ID NO: 1065504 - DNA, 33 bp, Homo sapien
gtcttcattcactgaccattttagttgagattt

SEQ ID NO: 1065505 - DNA, 33 bp, Homo sapien
gagcttgttgtcagggaaagctatggcagagat

SEQ ID NO: 1065506 - DNA, 33 bp, Homo sapien
gagcttgttgtcagggcaagctatggcagagat

SEQ ID NO: 1065507 - DNA, 33 bp, Homo sapien
agtcatcttttgcctacagtcagctttaatgtt

SEQ ID NO: 1065508 - DNA, 33 bp, Homo sapien
agtcatcttttgcctatagtcagctttaatgtt

SEQ ID NO: 1065509 - DNA, 33 bp, Homo sapien
taggcatagattcacagggtatgggtaaaactc

SEQ ID NO: 1065510 - DNA, 33 bp, Homo sapien
taggcatagattcacatggtatgggtaaaactc

SEQ ID NO: 1065511 - DNA, 33 bp, Homo sapien
tctgcccctcaattcacgtttttattgaacagc

SEQ ID NO: 1065512 - DNA, 33 bp, Homo sapien
tctgcccctcaattcatgtttttattgaacagc

SEQ ID NO: 1065513 - DNA, 33 bp, Homo sapien
aggtccctcagtcaggaatatggtgccttgaat

SEQ ID NO: 1065514 - DNA, 33 bp, Homo sapien
aggtccctcagtcagggatatggtgccttgaat

SEQ ID NO: 1065515 - DNA, 33 bp, Homo sapien
gttgtatttatttctgaaagtaaaatcgctagg

SEQ ID NO: 1065516 - DNA, 33 bp, Homo sapien
gttgtatttatttctggaagtaaaatcgctagg

SEQ ID NO: 1065517 - DNA, 33 bp, Homo sapien
ttggacccatgttttacaactgatagatgatct

SEQ ID NO: 1065518 - DNA, 33 bp, Homo sapien
ttggacccatgttttataactgatagatgatct

SEQ ID NO: 1065519 - DNA, 33 bp, Homo sapien
tataggtatatatccacgaccatgaaggaagga

SEQ ID NO: 1065520 - DNA, 33 bp, Homo sapien
tataggtatatatccatgaccatgaaggaagga

SEQ ID NO: 1065521 - DNA, 33 bp, Homo sapien
gctgtactcaaaatagaaagaactcaggctgaa

SEQ ID NO: 1065522 - DNA, 33 bp, Homo sapien
gctgtactcaaaataggaagaactcaggctgaa

SEQ ID NO: 1065523 - DNA, 33 bp, Homo sapien
gaacacatggcaatcaacatatcaagcttatga

SEQ ID NO: 1065524 - DNA, 33 bp, Homo sapien
gaacacatggcaatcaccatatcaagcttatga

SEQ ID NO: 1065525 - DNA, 33 bp, Homo sapien
tagagtacccaccatacgtttgcctttttttaa

SEQ ID NO: 1065526 - DNA, 33 bp, Homo sapien
tagagtacccaccatatgtttgcctttttttaa

SEQ ID NO: 1065527 - DNA, 33 bp, Homo sapien
atttaaatggaaaaatcaggctaaatagacaac

SEQ ID NO: 1065528 - DNA, 33 bp, Homo sapien
atttaaatggaaaaatgaggctaaatagacaac

SEQ ID NO: 1065529 - DNA, 33 bp, Homo sapien
gtacctacctacagtcaagctttatggtggtag

SEQ ID NO: 1065530 - DNA, 33 bp, Homo sapien
gtacctacctacagtcgagctttatggtggtag

SEQ ID NO: 1065531 - DNA, 33 bp, Homo sapien
atttttatacaacatcaaaaacgactatgagag

SEQ ID NO: 1065532 - DNA, 33 bp, Homo sapien
atttttatacaacatcgaaaacgactatgagag

SEQ ID NO: 1065533 - DNA, 33 bp, Homo sapien
cttgtctatcataataacctgtattctacgagt

SEQ ID NO: 1065534 - DNA, 33 bp, Homo sapien
cttgtctatcataatagcctgtattctacgagt

SEQ ID NO: 1065535 - DNA, 33 bp, Homo sapien
atactttcaaaccatagtagacagcctatccac

SEQ ID NO: 1065536 - DNA, 33 bp, Homo sapien
atactttcaaaccatattagacagcctatccac

SEQ ID NO: 1065537 - DNA, 33 bp, Homo sapien
gatgagctcccacaaagaatctgctgacacatg

SEQ ID NO: 1065538 - DNA, 33 bp, Homo sapien
gatgagctcccacaaataatctgctgacacatg

SEQ ID NO: 1065539 - DNA, 33 bp, Homo sapien
gcttctcagtattgcaactctataaaaaccgct

SEQ ID NO: 1065540 - DNA, 33 bp, Homo sapien
gcttctcagtattgcagctctataaaaaccgct

SEQ ID NO: 1065541 - DNA, 33 bp, Homo sapien
ccagcagtatccatgtaacagtgagtaagactc

SEQ ID NO: 1065542 - DNA, 33 bp, Homo sapien
ccagcagtatccatgtgacagtgagtaagactc

SEQ ID NO: 1065543 - DNA, 33 bp, Homo sapien
atgacaacttatagcaagtgttaaaatgatggt

SEQ ID NO: 1065544 - DNA, 33 bp, Homo sapien
atgacaacttatagcaggtgttaaaatgatggt

SEQ ID NO: 1065545 - DNA, 33 bp, Homo sapien
atacattggtgcaggacagagtatgtggattgt

SEQ ID NO: 1065546 - DNA, 33 bp, Homo sapien
atacattggtgcaggagagagtatgtggattgt

SEQ ID NO: 1065547 - DNA, 33 bp, Homo sapien
tcaaaagttgtacgaactgggctacggagtttt

SEQ ID NO: 1065548 - DNA, 33 bp, Homo sapien
tcaaaagttgtacgaattgggctacggagtttt

SEQ ID NO: 1065549 - DNA, 33 bp, Homo sapien
aagtcagacttactaacgaatcttggatgaata

SEQ ID NO: 1065550 - DNA, 33 bp, Homo sapien
aagtcagacttactaatgaatcttggatgaata

SEQ ID NO: 1065551 - DNA, 33 bp, Homo sapien
taaacctatcttcttaataaattacttggcctc

SEQ ID NO: 1065552 - DNA, 33 bp, Homo sapien
taaacctatcttcttagtaaattacttggcctc

SEQ ID NO: 1065553 - DNA, 33 bp, Homo sapien
aaattgagaaaatactgaggacttcaggaggag

SEQ ID NO: 1065554 - DNA, 33 bp, Homo sapien
aaattgagaaaatacttaggacttcaggaggag

SEQ ID NO: 1065555 - DNA, 33 bp, Homo sapien
ctaagtgcagtatttacagtgtgcagactaagt

SEQ ID NO: 1065556 - DNA, 33 bp, Homo sapien
ctaagtgcagtatttatagtgtgcagactaagt

SEQ ID NO: 1065557 - DNA, 33 bp, Homo sapien
acatcaaacagcaggaatatcagcctggtagca

SEQ ID NO: 1065558 - DNA, 33 bp, Homo sapien
acatcaaacagcaggattatcagcctggtagca

SEQ ID NO: 1065559 - DNA, 33 bp, Homo sapien
ggactagtccctgtggcaatagattagttcgca

SEQ ID NO: 1065560 - DNA, 33 bp, Homo sapien
ggactagtccctgtggtaatagattagttcgca

SEQ ID NO: 1065561 - DNA, 33 bp, Homo sapien
caatggagagaacaaaagatgctacaagaacta

SEQ ID NO: 1065562 - DNA, 33 bp, Homo sapien
caatggagagaacaaacgatgctacaagaacta

SEQ ID NO: 1065563 - DNA, 33 bp, Homo sapien
cactgccactgccttacggattgctttggctgg

SEQ ID NO: 1065564 - DNA, 33 bp, Homo sapien
cactgccactgccttatggattgctttggctgg

SEQ ID NO: 1065565 - DNA, 33 bp, Homo sapien
acattttaaaggaagcacaaaagtaggtattac

SEQ ID NO: 1065566 - DNA, 33 bp, Homo sapien
acattttaaaggaagcgcaaaagtaggtattac

SEQ ID NO: 1065567 - DNA, 33 bp, Homo sapien
taatttttgtgccccacgtgttatactctaaaa

SEQ ID NO: 1065568 - DNA, 33 bp, Homo sapien
taatttttgtgccccatgtgttatactctaaaa

SEQ ID NO: 1065569 - DNA, 33 bp, Homo sapien
acaagtaaacaagaatgaatagcaacccagggg

SEQ ID NO: 1065570 - DNA, 33 bp, Homo sapien
acaagtaaacaagaattaatagcaacccagggg

SEQ ID NO: 1065571 - DNA, 33 bp, Homo sapien
aaattaaattggccagaatatagttggctattt

SEQ ID NO: 1065572 - DNA, 33 bp, Homo sapien
aaattaaattggccagtatatagttggctattt

SEQ ID NO: 1065573 - DNA, 33 bp, Homo sapien
tctgaatgttctagagaaatgctgtccaacaga

SEQ ID NO: 1065574 - DNA, 33 bp, Homo sapien
tctgaatgttctagagcaatgctgtccaacaga

SEQ ID NO: 1065575 - DNA, 33 bp, Homo sapien
taccttgactgtagacagaattgagagaataca

SEQ ID NO: 1065576 - DNA, 33 bp, Homo sapien
taccttgactgtagacggaattgagagaataca

SEQ ID NO: 1065577 - DNA, 33 bp, Homo sapien
aagtgatgtgccagagcaagatctgtggctaca

SEQ ID NO: 1065578 - DNA, 33 bp, Homo sapien
aagtgatgtgccagagtaagatctgtggctaca

SEQ ID NO: 1065579 - DNA, 33 bp, Homo sapien
ttcttcaagtcaaagcaactagggctaataatg

SEQ ID NO: 1065580 - DNA, 33 bp, Homo sapien
ttcttcaagtcaaagcgactagggctaataatg

SEQ ID NO: 1065581 - DNA, 33 bp, Homo sapien
ctattgtttcagaagaactgattaataaacata

SEQ ID NO: 1065582 - DNA, 33 bp, Homo sapien
ctattgtttcagaagacctgattaataaacata

SEQ ID NO: 1065583 - DNA, 33 bp, Homo sapien
gacagtctgctgtcagcctacagtctaagttcc

SEQ ID NO: 1065584 - DNA, 33 bp, Homo sapien
gacagtctgctgtcagtctacagtctaagttcc

SEQ ID NO: 1065585 - DNA, 33 bp, Homo sapien
tctaatacgttggacaagtgatttaattttctc

SEQ ID NO: 1065586 - DNA, 33 bp, Homo sapien
tctaatacgttggacaggtgatttaattttctc

SEQ ID NO: 1065587 - DNA, 33 bp, Homo sapien
gctgggtgaagcctggaaaaagaaaatggagag

SEQ ID NO: 1065588 - DNA, 33 bp, Homo sapien
gctgggtgaagcctgggaaaagaaaatggagag

SEQ ID NO: 1065589 - DNA, 33 bp, Homo sapien
tgtaaggttacataaactgtaggtatagtgtga

SEQ ID NO: 1065590 - DNA, 33 bp, Homo sapien
tgtaaggttacataaattgtaggtatagtgtga

SEQ ID NO: 1065591 - DNA, 33 bp, Homo sapien
tgtggagtagtagagcacagtgactggctttac

SEQ ID NO: 1065592 - DNA, 33 bp, Homo sapien
tgtggagtagtagagcgcagtgactggctttac

SEQ ID NO: 1065593 - DNA, 33 bp, Homo sapien
gtcatgagaattttcaaatggaaacttcttcaa

SEQ ID NO: 1065594 - DNA, 33 bp, Homo sapien
gtcatgagaattttcagatggaaacttcttcaa

SEQ ID NO: 1065595 - DNA, 33 bp, Homo sapien
aggagctatccacaagcaaagaacagacagaac

SEQ ID NO: 1065596 - DNA, 33 bp, Homo sapien
aggagctatccacaaggaaagaacagacagaac

SEQ ID NO: 1065597 - DNA, 33 bp, Homo sapien
ctctccgttaataccaatcgcactagtgaaatg

SEQ ID NO: 1065598 - DNA, 33 bp, Homo sapien
ctctccgttaataccagtcgcactagtgaaatg

SEQ ID NO: 1065599 - DNA, 33 bp, Homo sapien
atccattgttagacaacttcctcatcgtgcaaa

SEQ ID NO: 1065600 - DNA, 33 bp, Homo sapien
atccattgttagacaatttcctcatcgtgcaaa

SEQ ID NO: 1065601 - DNA, 33 bp, Homo sapien
ttgttctctctccttacgctaatttggtgtctc

SEQ ID NO: 1065602 - DNA, 33 bp, Homo sapien
ttgttctctctccttatgctaatttggtgtctc

SEQ ID NO: 1065603 - DNA, 33 bp, Homo sapien
ctacatgtttacccaacggtgcattcaacgaat

SEQ ID NO: 1065604 - DNA, 33 bp, Homo sapien
ctacatgtttacccaatggtgcattcaacgaat

SEQ ID NO: 1065605 - DNA, 33 bp, Homo sapien
attcatttttttgtaactgaatctgttaacctt

SEQ ID NO: 1065606 - DNA, 33 bp, Homo sapien
attcatttttttgtaattgaatctgttaacctt

SEQ ID NO: 1065607 - DNA, 33 bp, Homo sapien
aatgtgagaggcaaaacagtaaagcttctagag

SEQ ID NO: 1065608 - DNA, 33 bp, Homo sapien
aatgtgagaggcaaaatagtaaagcttctagag

SEQ ID NO: 1065609 - DNA, 33 bp, Homo sapien
ttatggctgtataataacccatggtgtatatgt

SEQ ID NO: 1065610 - DNA, 33 bp, Homo sapien
ttatggctgtataatatcccatggtgtatatgt

SEQ ID NO: 1065611 - DNA, 33 bp, Homo sapien
taaaaagagaagccctcaaacaactgaagtgac

SEQ ID NO: 1065612 - DNA, 33 bp, Homo sapien
taaaaagagaagcccttaaacaactgaagtgac

SEQ ID NO: 1065613 - DNA, 33 bp, Homo sapien
gggacaatgaaaggtacagatcctacaaagcct

SEQ ID NO: 1065614 - DNA, 33 bp, Homo sapien
gggacaatgaaaggtatagatcctacaaagcct

SEQ ID NO: 1065615 - DNA, 33 bp, Homo sapien
tatctaccattactgaacccatttattcaaaga

SEQ ID NO: 1065616 - DNA, 33 bp, Homo sapien
tatctaccattactgaccccatttattcaaaga

SEQ ID NO: 1065617 - DNA, 33 bp, Homo sapien
agtaggttcctttgagaagaagagactttacag

SEQ ID NO: 1065618 - DNA, 33 bp, Homo sapien
agtaggttcctttgaggagaagagactttacag

SEQ ID NO: 1065619 - DNA, 33 bp, Homo sapien
tgtgtgagacattctgaaagataattggcttgg

SEQ ID NO: 1065620 - DNA, 33 bp, Homo sapien
tgtgtgagacattctggaagataattggcttgg

SEQ ID NO: 1065621 - DNA, 33 bp, Homo sapien
caaaatgctataaaacaaaattgccagaatgat

SEQ ID NO: 1065622 - DNA, 33 bp, Homo sapien
caaaatgctataaaacgaaattgccagaatgat

SEQ ID NO: 1065623 - DNA, 33 bp, Homo sapien
tacttctcgtttctcaaatcatttgatggctga

SEQ ID NO: 1065624 - DNA, 33 bp, Homo sapien
tacttctcgtttctcagatcatttgatggctga

SEQ ID NO: 1065625 - DNA, 33 bp, Homo sapien
ttgatgcacacgacaacttgggtggatcacaag

SEQ ID NO: 1065626 - DNA, 33 bp, Homo sapien
ttgatgcacacgacaagttgggtggatcacaag

SEQ ID NO: 1065627 - DNA, 33 bp, Homo sapien
gatggttacacaattcaataaacttactaaaat

SEQ ID NO: 1065628 - DNA, 33 bp, Homo sapien
gatggttacacaattcgataaacttactaaaat

SEQ ID NO: 1065629 - DNA, 33 bp, Homo sapien
gctctggaaagacatacgcaattacagtggtta

SEQ ID NO: 1065630 - DNA, 33 bp, Homo sapien
gctctggaaagacatatgcaattacagtggtta

SEQ ID NO: 1065631 - DNA, 33 bp, Homo sapien
ttggcttccctgaacaatgtcggaaatacagaa

SEQ ID NO: 1065632 - DNA, 33 bp, Homo sapien
ttggcttccctgaacagtgtcggaaatacagaa

SEQ ID NO: 1065633 - DNA, 33 bp, Homo sapien
tctaaccaagcaacaccggaaccctcagaccac

SEQ ID NO: 1065634 - DNA, 33 bp, Homo sapien
tctaaccaagcaacactggaaccctcagaccac

SEQ ID NO: 1065635 - DNA, 33 bp, Homo sapien
aatcactgtccatggaaagtataccaatttttg

SEQ ID NO: 1065636 - DNA, 33 bp, Homo sapien
aatcactgtccatggagagtataccaatttttg

SEQ ID NO: 1065637 - DNA, 33 bp, Homo sapien
ctaattctccataggaatatttgtggcaggaaa

SEQ ID NO: 1065638 - DNA, 33 bp, Homo sapien
ctaattctccataggattatttgtggcaggaaa

SEQ ID NO: 1065639 - DNA, 33 bp, Homo sapien
gctctcatggagctcacgttctagtacagaaag

SEQ ID NO: 1065640 - DNA, 33 bp, Homo sapien
gctctcatggagctcatgttctagtacagaaag

SEQ ID NO: 1065641 - DNA, 33 bp, Homo sapien
cattgggaactgtaccactggagaactttgaga

SEQ ID NO: 1065642 - DNA, 33 bp, Homo sapien
cattgggaactgtaccgctggagaactttgaga

SEQ ID NO: 1065643 - DNA, 33 bp, Homo sapien
atctctttaaaaacctaacctccatatacagtc

SEQ ID NO: 1065644 - DNA, 33 bp, Homo sapien
atctctttaaaaaccttacctccatatacagtc

SEQ ID NO: 1065645 - DNA, 33 bp, Homo sapien
catcaactgtgatagcaaattcaggaggcagtg

SEQ ID NO: 1065646 - DNA, 33 bp, Homo sapien
catcaactgtgatagcgaattcaggaggcagtg

SEQ ID NO: 1065647 - DNA, 33 bp, Homo sapien
aaacctgaactcttaacggtttgacatttcctt

SEQ ID NO: 1065648 - DNA, 33 bp, Homo sapien
aaacctgaactcttaatggtttgacatttcctt

SEQ ID NO: 1065649 - DNA, 33 bp, Homo sapien
cccaacagaagctgaaaagatgctagcaccatg

SEQ ID NO: 1065650 - DNA, 33 bp, Homo sapien
cccaacagaagctgaacagatgctagcaccatg

SEQ ID NO: 1065651 - DNA, 33 bp, Homo sapien
gcctgccaagaaactacggtcaggcctacccac

SEQ ID NO: 1065652 - DNA, 33 bp, Homo sapien
gcctgccaagaaactatggtcaggcctacccac

SEQ ID NO: 1065653 - DNA, 33 bp, Homo sapien
taggcttgctgtgagacagattgggttcaaaat

SEQ ID NO: 1065654 - DNA, 33 bp, Homo sapien
taggcttgctgtgagagagattgggttcaaaat

SEQ ID NO: 1065655 - DNA, 33 bp, Homo sapien
aaaaggtttattggccacagagaaatattctca

SEQ ID NO: 1065656 - DNA, 33 bp, Homo sapien
aaaaggtttattggccgcagagaaatattctca

SEQ ID NO: 1065657 - DNA, 33 bp, Homo sapien
gtgtatttggccattaccagaaacctagggcag

SEQ ID NO: 1065658 - DNA, 33 bp, Homo sapien
gtgtatttggccattatcagaaacctagggcag

SEQ ID NO: 1065659 - DNA, 33 bp, Homo sapien
ggaatggtttcctacccagatagtctctctatc

SEQ ID NO: 1065660 - DNA, 33 bp, Homo sapien
ggaatggtttcctacctagatagtctctctatc

SEQ ID NO: 1065661 - DNA, 33 bp, Homo sapien
ctgagtcactgacatacaactagctgccctaat

SEQ ID NO: 1065662 - DNA, 33 bp, Homo sapien
ctgagtcactgacatagaactagctgccctaat

SEQ ID NO: 1065663 - DNA, 33 bp, Homo sapien
agtttctgggtaatggaaagagtctttgtagtg

SEQ ID NO: 1065664 - DNA, 33 bp, Homo sapien
agtttctgggtaatgggaagagtctttgtagtg

SEQ ID NO: 1065665 - DNA, 33 bp, Homo sapien
aaaaggccatgcacgtgaacaaagcagctcaca

SEQ ID NO: 1065666 - DNA, 33 bp, Homo sapien
aaaaggccatgcacgttaacaaagcagctcaca

SEQ ID NO: 1065667 - DNA, 33 bp, Homo sapien
ttgatgagtgaatgaaaaaattagggaaatgct

SEQ ID NO: 1065668 - DNA, 33 bp, Homo sapien
ttgatgagtgaatgaacaaattagggaaatgct

SEQ ID NO: 1065669 - DNA, 33 bp, Homo sapien
ctggactcaggtgaaacaagtggttttttgcaa

SEQ ID NO: 1065670 - DNA, 33 bp, Homo sapien
ctggactcaggtgaaagaagtggttttttgcaa

SEQ ID NO: 1065671 - DNA, 33 bp, Homo sapien
caagacacaatgaggacgtttgtttctgatgtg

SEQ ID NO: 1065672 - DNA, 33 bp, Homo sapien
caagacacaatgaggatgtttgtttctgatgtg

SEQ ID NO: 1065673 - DNA, 33 bp, Homo sapien
attcattcttttgacaaatttagcaagggccta

SEQ ID NO: 1065674 - DNA, 33 bp, Homo sapien
attcattcttttgacatatttagcaagggccta

SEQ ID NO: 1065675 - DNA, 33 bp, Homo sapien
ctagctccttttccaaactatccatccctcttc

SEQ ID NO: 1065676 - DNA, 33 bp, Homo sapien
ctagctccttttccaatctatccatccctcttc

SEQ ID NO: 1065677 - DNA, 33 bp, Homo sapien
atgtaataacttgagacgtgtgatgaatgaata

SEQ ID NO: 1065678 - DNA, 33 bp, Homo sapien
atgtaataacttgagatgtgtgatgaatgaata

SEQ ID NO: 1065679 - DNA, 33 bp, Homo sapien
cagttccaaaccaccacagtaaatcaaacattg

SEQ ID NO: 1065680 - DNA, 33 bp, Homo sapien
cagttccaaaccaccatagtaaatcaaacattg

SEQ ID NO: 1065681 - DNA, 33 bp, Homo sapien
ctcctaacccatgcttaaaatatgcttaatgga

SEQ ID NO: 1065682 - DNA, 33 bp, Homo sapien
ctcctaacccatgcttgaaatatgcttaatgga

SEQ ID NO: 1065683 - DNA, 33 bp, Homo sapien
cagtggttggtgtgaactgtggcacgtggatgc

SEQ ID NO: 1065684 - DNA, 33 bp, Homo sapien
cagtggttggtgtgaattgtggcacgtggatgc

SEQ ID NO: 1065685 - DNA, 33 bp, Homo sapien
caagccatctttctaaaaggcatatctgatcgg

SEQ ID NO: 1065686 - DNA, 33 bp, Homo sapien
caagccatctttctaagaggcatatctgatcgg

SEQ ID NO: 1065687 - DNA, 33 bp, Homo sapien
acttgctgtcagaaaacgcaggatagatgccag

SEQ ID NO: 1065688 - DNA, 33 bp, Homo sapien
acttgctgtcagaaaatgcaggatagatgccag

SEQ ID NO: 1065689 - DNA, 33 bp, Homo sapien
ctgctgaaaccagaaaccttgattcctccccca

SEQ ID NO: 1065690 - DNA, 33 bp, Homo sapien
ctgctgaaaccagaaatcttgattcctccccca

SEQ ID NO: 1065691 - DNA, 33 bp, Homo sapien
gatacaaacttcaaacaagtgcattcaaagccc

SEQ ID NO: 1065692 - DNA, 33 bp, Homo sapien
gatacaaacttcaaacgagtgcattcaaagccc

SEQ ID NO: 1065693 - DNA, 33 bp, Homo sapien
ttataattgaagtataactaatgaacaactcag

SEQ ID NO: 1065694 - DNA, 33 bp, Homo sapien
ttataattgaagtatagctaatgaacaactcag

SEQ ID NO: 1065695 - DNA, 33 bp, Homo sapien
gtgtgacacattcggacgaggcttggcatattc

SEQ ID NO: 1065696 - DNA, 33 bp, Homo sapien
gtgtgacacattcggatgaggcttggcatattc

SEQ ID NO: 1065697 - DNA, 33 bp, Homo sapien
gcagcaaagtccagaactggcctaatgagtatc

SEQ ID NO: 1065698 - DNA, 33 bp, Homo sapien
gcagcaaagtccagaattggcctaatgagtatc

SEQ ID NO: 1065699 - DNA, 33 bp, Homo sapien
ctctgcctggtagcaaaaaatctgccattgatc

SEQ ID NO: 1065700 - DNA, 33 bp, Homo sapien
ctctgcctggtagcaacaaatctgccattgatc

SEQ ID NO: 1065701 - DNA, 33 bp, Homo sapien
tcccctgggcctctaaatgccaggccaggagca

SEQ ID NO: 1065702 - DNA, 33 bp, Homo sapien
tcccctgggcctctaactgccaggccaggagca

SEQ ID NO: 1065703 - DNA, 33 bp, Homo sapien
acatttgctcattttacgacaggttcctacgta

SEQ ID NO: 1065704 - DNA, 33 bp, Homo sapien
acatttgctcattttatgacaggttcctacgta

SEQ ID NO: 1065705 - DNA, 33 bp, Homo sapien
aatattggctgtataactaaaagccaagggaaa

SEQ ID NO: 1065706 - DNA, 33 bp, Homo sapien
aatattggctgtataattaaaagccaagggaaa

SEQ ID NO: 1065707 - DNA, 33 bp, Homo sapien
actttaggcatcaaatcatctcattgtctaaaa

SEQ ID NO: 1065708 - DNA, 33 bp, Homo sapien
actttaggcatcaaattatctcattgtctaaaa

SEQ ID NO: 1065709 - DNA, 33 bp, Homo sapien
agagatggttaaaggaagatatgacaaatgtct

SEQ ID NO: 1065710 - DNA, 33 bp, Homo sapien
agagatggttaaaggaggatatgacaaatgtct

SEQ ID NO: 1065711 - DNA, 33 bp, Homo sapien
taacatacagtcaaaaccactctgaggaatcaa

SEQ ID NO: 1065712 - DNA, 33 bp, Homo sapien
taacatacagtcaaaagcactctgaggaatcaa

SEQ ID NO: 1065713 - DNA, 33 bp, Homo sapien
attgactgggtgtaagcaggaatcttagcttac

SEQ ID NO: 1065714 - DNA, 33 bp, Homo sapien
attgactgggtgtaagtaggaatcttagcttac

SEQ ID NO: 1065715 - DNA, 33 bp, Homo sapien
ctgtagccttagtttccacaacttgcctgtcct

SEQ ID NO: 1065716 - DNA, 33 bp, Homo sapien
ctgtagccttagtttctacaacttgcctgtcct

SEQ ID NO: 1065717 - DNA, 33 bp, Homo sapien
tgaattggagcaagacaaaacagagtaggaact

SEQ ID NO: 1065718 - DNA, 33 bp, Homo sapien
tgaattggagcaagacgaaacagagtaggaact

SEQ ID NO: 1065719 - DNA, 33 bp, Homo sapien
tctttcatactctcaaaacaggttttactttat

SEQ ID NO: 1065720 - DNA, 33 bp, Homo sapien
tctttcatactctcaatacaggttttactttat

SEQ ID NO: 1065721 - DNA, 33 bp, Homo sapien
gctttgccctgaggaagttacctggaccttcag

SEQ ID NO: 1065722 - DNA, 33 bp, Homo sapien
gctttgccctgaggaatttacctggaccttcag

SEQ ID NO: 1065723 - DNA, 33 bp, Homo sapien
ggttatctttgttagagaaaagtgcgtgttggt

SEQ ID NO: 1065724 - DNA, 33 bp, Homo sapien
ggttatctttgttagataaaagtgcgtgttggt

SEQ ID NO: 1065725 - DNA, 33 bp, Homo sapien
tccatgtcaataaaatcatcttgttgaggaatt

SEQ ID NO: 1065726 - DNA, 33 bp, Homo sapien
tccatgtcaataaaatgatcttgttgaggaatt

SEQ ID NO: 1065727 - DNA, 33 bp, Homo sapien
tatcaatcttaacccaaatattgagaacagact

SEQ ID NO: 1065728 - DNA, 33 bp, Homo sapien
tatcaatcttaacccagatattgagaacagact

SEQ ID NO: 1065729 - DNA, 33 bp, Homo sapien
tcattggccatcatcacagatccataggtagaa

SEQ ID NO: 1065730 - DNA, 33 bp, Homo sapien
tcattggccatcatcatagatccataggtagaa

SEQ ID NO: 1065731 - DNA, 33 bp, Homo sapien
aaggcctgggaatgtgaaaaggatcaggtcttt

SEQ ID NO: 1065732 - DNA, 33 bp, Homo sapien
aaggcctgggaatgtggaaaggatcaggtcttt

SEQ ID NO: 1065733 - DNA, 33 bp, Homo sapien
attgtgtattatgtgaaaaagtaatgagtgcta

SEQ ID NO: 1065734 - DNA, 33 bp, Homo sapien
attgtgtattatgtgagaaagtaatgagtgcta

SEQ ID NO: 1065735 - DNA, 33 bp, Homo sapien
gctgtggagcctagcaacaaatatcaattgagc

SEQ ID NO: 1065736 - DNA, 33 bp, Homo sapien
gctgtggagcctagcatcaaatatcaattgagc

SEQ ID NO: 1065737 - DNA, 33 bp, Homo sapien
taattatattgaatgcaaataccactacagtag

SEQ ID NO: 1065738 - DNA, 33 bp, Homo sapien
taattatattgaatgcgaataccactacagtag

SEQ ID NO: 1065739 - DNA, 33 bp, Homo sapien
ttgcctgagatttacccgattttaaaactataa

SEQ ID NO: 1065740 - DNA, 33 bp, Homo sapien
ttgcctgagatttacctgattttaaaactataa

SEQ ID NO: 1065741 - DNA, 33 bp, Homo sapien
ttgaaattcaatttccggactagtcttgtcaac

SEQ ID NO: 1065742 - DNA, 33 bp, Homo sapien
ttgaaattcaatttcctgactagtcttgtcaac

SEQ ID NO: 1065743 - DNA, 33 bp, Homo sapien
ctctgtccctgttcaaatgtatcttcttgagct

SEQ ID NO: 1065744 - DNA, 33 bp, Homo sapien
ctctgtccctgttcaagtgtatcttcttgagct

SEQ ID NO: 1065745 - DNA, 33 bp, Homo sapien
tatgctctttaatagaaatgggactagaatcca

SEQ ID NO: 1065746 - DNA, 33 bp, Homo sapien
tatgctctttaatagagatgggactagaatcca

SEQ ID NO: 1065747 - DNA, 33 bp, Homo sapien
tgacagcagtagatgacccaacctccagtgatc

SEQ ID NO: 1065748 - DNA, 33 bp, Homo sapien
tgacagcagtagatgatccaacctccagtgatc

SEQ ID NO: 1065749 - DNA, 33 bp, Homo sapien
taaccactgcgtctcaagtaagagctgtaggac

SEQ ID NO: 1065750 - DNA, 33 bp, Homo sapien
taaccactgcgtctcaggtaagagctgtaggac

SEQ ID NO: 1065751 - DNA, 33 bp, Homo sapien
ccctgggtcagctcaactggacaattccaggag

SEQ ID NO: 1065752 - DNA, 33 bp, Homo sapien
ccctgggtcagctcaattggacaattccaggag

SEQ ID NO: 1065753 - DNA, 33 bp, Homo sapien
ttgtgattttaatatacgccatatccagggatg

SEQ ID NO: 1065754 - DNA, 33 bp, Homo sapien
ttgtgattttaatatatgccatatccagggatg

SEQ ID NO: 1065755 - DNA, 33 bp, Homo sapien
aatgggaaagctgaagcatgacggtagagcagc

SEQ ID NO: 1065756 - DNA, 33 bp, Homo sapien
aatgggaaagctgaaggatgacggtagagcagc

SEQ ID NO: 1065757 - DNA, 33 bp, Homo sapien
agtgaccagatcacaactccatggtgtctcaag

SEQ ID NO: 1065758 - DNA, 33 bp, Homo sapien
agtgaccagatcacaattccatggtgtctcaag

SEQ ID NO: 1065759 - DNA, 33 bp, Homo sapien
gcaagtctttaagagcaacatgtggttatggtt

SEQ ID NO: 1065760 - DNA, 33 bp, Homo sapien
gcaagtctttaagagctacatgtggttatggtt

SEQ ID NO: 1065761 - DNA, 33 bp, Homo sapien
aaggacattccagacaaagaaagcttgtaccaa

SEQ ID NO: 1065762 - DNA, 33 bp, Homo sapien
aaggacattccagacagagaaagcttgtaccaa

SEQ ID NO: 1065763 - DNA, 33 bp, Homo sapien
ctcaaagtccaagtccaaaaatggaaagtgaca

SEQ ID NO: 1065764 - DNA, 33 bp, Homo sapien
ctcaaagtccaagtcccaaaatggaaagtgaca

SEQ ID NO: 1065765 - DNA, 33 bp, Homo sapien
cttgcaaaatttcctcagacaaatggatctgag

SEQ ID NO: 1065766 - DNA, 33 bp, Homo sapien
cttgcaaaatttcctcggacaaatggatctgag

SEQ ID NO: 1065767 - DNA, 33 bp, Homo sapien
taatgacattttatgacggagcaatgagaaagg

SEQ ID NO: 1065768 - DNA, 33 bp, Homo sapien
taatgacattttatgatggagcaatgagaaagg

SEQ ID NO: 1065769 - DNA, 33 bp, Homo sapien
aaagggaatgatataaactctagccttttgggt

SEQ ID NO: 1065770 - DNA, 33 bp, Homo sapien
aaagggaatgatataacctctagccttttgggt

SEQ ID NO: 1065771 - DNA, 33 bp, Homo sapien
attatttgtctcgaagcctaccttatctgatat

SEQ ID NO: 1065772 - DNA, 33 bp, Homo sapien
attatttgtctcgaagtctaccttatctgatat

SEQ ID NO: 1065773 - DNA, 33 bp, Homo sapien
atgaaaaagctgttgccgaataggaactaagac

SEQ ID NO: 1065774 - DNA, 33 bp, Homo sapien
atgaaaaagctgttgctgaataggaactaagac

SEQ ID NO: 1065775 - DNA, 33 bp, Homo sapien
cagggttcagagttcaaaagtctaggattcaaa

SEQ ID NO: 1065776 - DNA, 33 bp, Homo sapien
cagggttcagagttcagaagtctaggattcaaa

SEQ ID NO: 1065777 - DNA, 33 bp, Homo sapien
gagcttctactctaacaataccacagctgccac

SEQ ID NO: 1065778 - DNA, 33 bp, Homo sapien
gagcttctactctaacgataccacagctgccac

SEQ ID NO: 1065779 - DNA, 33 bp, Homo sapien
atcggttcagtaaatcaatgaggcaatttttta

SEQ ID NO: 1065780 - DNA, 33 bp, Homo sapien
atcggttcagtaaatcgatgaggcaatttttta

SEQ ID NO: 1065781 - DNA, 33 bp, Homo sapien
gaatacatggttaataccaatgagtgctgtcag

SEQ ID NO: 1065782 - DNA, 33 bp, Homo sapien
gaatacatggttaatatcaatgagtgctgtcag

SEQ ID NO: 1065783 - DNA, 33 bp, Homo sapien
tggaaaataacttggcaacacagctagtcctca

SEQ ID NO: 1065784 - DNA, 33 bp, Homo sapien
tggaaaataacttggcgacacagctagtcctca

SEQ ID NO: 1065785 - DNA, 33 bp, Homo sapien
agagccaagttctgtacgtaccctgaatctgtt

SEQ ID NO: 1065786 - DNA, 33 bp, Homo sapien
agagccaagttctgtatgtaccctgaatctgtt

SEQ ID NO: 1065787 - DNA, 33 bp, Homo sapien
ggactgaaagtgcttcactgggtagtagaggta

SEQ ID NO: 1065788 - DNA, 33 bp, Homo sapien
ggactgaaagtgcttccctgggtagtagaggta

SEQ ID NO: 1065789 - DNA, 33 bp, Homo sapien
taatttgttaaagtgaggaatcatataaaacaa

SEQ ID NO: 1065790 - DNA, 33 bp, Homo sapien
taatttgttaaagtgatgaatcatataaaacaa

SEQ ID NO: 1065791 - DNA, 33 bp, Homo sapien
ttaggaatgtaacttacgtgaaaaagagtctgt

SEQ ID NO: 1065792 - DNA, 33 bp, Homo sapien
ttaggaatgtaacttatgtgaaaaagagtctgt

SEQ ID NO: 1065793 - DNA, 33 bp, Homo sapien
atacagtgattaaaaaaaggcctctgctatatc

SEQ ID NO: 1065794 - DNA, 33 bp, Homo sapien
atacagtgattaaaaagaggcctctgctatatc

SEQ ID NO: 1065795 - DNA, 33 bp, Homo sapien
tatatttgggacttcgaattctacccaaccata

SEQ ID NO: 1065796 - DNA, 33 bp, Homo sapien
tatatttgggacttcggattctacccaaccata

SEQ ID NO: 1065797 - DNA, 33 bp, Homo sapien
tgaattccaccacttacgtgctatgggagcttt

SEQ ID NO: 1065798 - DNA, 33 bp, Homo sapien
tgaattccaccacttatgtgctatgggagcttt

SEQ ID NO: 1065799 - DNA, 33 bp, Homo sapien
aaaccagaattcctgacgcttcccaagcaagct

SEQ ID NO: 1065800 - DNA, 33 bp, Homo sapien
aaaccagaattcctgatgcttcccaagcaagct

SEQ ID NO: 1065801 - DNA, 33 bp, Homo sapien
cagctcctcagtagaactagccatatttcaggt

SEQ ID NO: 1065802 - DNA, 33 bp, Homo sapien
cagctcctcagtagaagtagccatatttcaggt

SEQ ID NO: 1065803 - DNA, 33 bp, Homo sapien
tccagacagtaacccaaacaatgttattatcat

SEQ ID NO: 1065804 - DNA, 33 bp, Homo sapien
tccagacagtaacccagacaatgttattatcat

SEQ ID NO: 1065805 - DNA, 33 bp, Homo sapien
atcctaacgacagccccatacggaaagtattat

SEQ ID NO: 1065806 - DNA, 33 bp, Homo sapien
atcctaacgacagccctatacggaaagtattat

SEQ ID NO: 1065807 - DNA, 33 bp, Homo sapien
gggaacccaccttgaaatcaccaaacaatggtc

SEQ ID NO: 1065808 - DNA, 33 bp, Homo sapien
gggaacccaccttgaagtcaccaaacaatggtc

SEQ ID NO: 1065809 - DNA, 33 bp, Homo sapien
gtctgggtttggatgacgtaataacctgcattt

SEQ ID NO: 1065810 - DNA, 33 bp, Homo sapien
gtctgggtttggatgatgtaataacctgcattt

SEQ ID NO: 1065811 - DNA, 33 bp, Homo sapien
aatgcgtctttgcacaataagtttagacttgtt

SEQ ID NO: 1065812 - DNA, 33 bp, Homo sapien
aatgcgtctttgcacagtaagtttagacttgtt

SEQ ID NO: 1065813 - DNA, 33 bp, Homo sapien
agagagcataggtaaaatgcctttagctgcact

SEQ ID NO: 1065814 - DNA, 33 bp, Homo sapien
agagagcataggtaaactgcctttagctgcact

SEQ ID NO: 1065815 - DNA, 33 bp, Homo sapien
catatacatataacacaatttcaaccaatgata

SEQ ID NO: 1065816 - DNA, 33 bp, Homo sapien
catatacatataacacgatttcaaccaatgata

SEQ ID NO: 1065817 - DNA, 33 bp, Homo sapien
atatatgtaactagtcccctacataactgttac

SEQ ID NO: 1065818 - DNA, 33 bp, Homo sapien
atatatgtaactagtctcctacataactgttac

SEQ ID NO: 1065819 - DNA, 33 bp, Homo sapien
caaattatttaattacacagatattaagcctag

SEQ ID NO: 1065820 - DNA, 33 bp, Homo sapien
caaattatttaattacgcagatattaagcctag

SEQ ID NO: 1065821 - DNA, 33 bp, Homo sapien
tattctttgcaaaaaaattctaaatgtgtgtgt

SEQ ID NO: 1065822 - DNA, 33 bp, Homo sapien
tattctttgcaaaaaagttctaaatgtgtgtgt

SEQ ID NO: 1065823 - DNA, 33 bp, Homo sapien
ttattgatgagctaacaaatgtatatattatga

SEQ ID NO: 1065824 - DNA, 33 bp, Homo sapien
ttattgatgagctaaccaatgtatatattatga

SEQ ID NO: 1065825 - DNA, 33 bp, Homo sapien
aggtaaataaaaggaacgcccataatgatggaa

SEQ ID NO: 1065826 - DNA, 33 bp, Homo sapien
aggtaaataaaaggaaggcccataatgatggaa

SEQ ID NO: 1065827 - DNA, 33 bp, Homo sapien
gcctatagtcattacaaaagacttgacaggaat

SEQ ID NO: 1065828 - DNA, 33 bp, Homo sapien
gcctatagtcattacagaagacttgacaggaat

SEQ ID NO: 1065829 - DNA, 33 bp, Homo sapien
ctgttctatgatagccaagagttcaggaacact

SEQ ID NO: 1065830 - DNA, 33 bp, Homo sapien
ctgttctatgatagccgagagttcaggaacact

SEQ ID NO: 1065831 - DNA, 33 bp, Homo sapien
ttgattagtcatctgtaaaaatatgtatttgta

SEQ ID NO: 1065832 - DNA, 33 bp, Homo sapien
ttgattagtcatctgttaaaatatgtatttgta

SEQ ID NO: 1065833 - DNA, 33 bp, Homo sapien
cctgctttggacaccaatcatatcacttctatc

SEQ ID NO: 1065834 - DNA, 33 bp, Homo sapien
cctgctttggacaccagtcatatcacttctatc

SEQ ID NO: 1065835 - DNA, 33 bp, Homo sapien
acaggataatttcacacagtaatgaaggtcatg

SEQ ID NO: 1065836 - DNA, 33 bp, Homo sapien
acaggataatttcacatagtaatgaaggtcatg

SEQ ID NO: 1065837 - DNA, 33 bp, Homo sapien
agaagaagccttgtgaagatctgaagcaaaagt

SEQ ID NO: 1065838 - DNA, 33 bp, Homo sapien
agaagaagccttgtgacgatctgaagcaaaagt

SEQ ID NO: 1065839 - DNA, 33 bp, Homo sapien
cactagggatattgaaaaaaactgtatgaccac

SEQ ID NO: 1065840 - DNA, 33 bp, Homo sapien
cactagggatattgaagaaaactgtatgaccac

SEQ ID NO: 1065841 - DNA, 33 bp, Homo sapien
tcctctcgatgattaactcaaatgccattctga

SEQ ID NO: 1065842 - DNA, 33 bp, Homo sapien
tcctctcgatgattaattcaaatgccattctga

SEQ ID NO: 1065843 - DNA, 33 bp, Homo sapien
aatcttattatagctacaccagttgtcatatgc

SEQ ID NO: 1065844 - DNA, 33 bp, Homo sapien
aatcttattatagctataccagttgtcatatgc

SEQ ID NO: 1065845 - DNA, 33 bp, Homo sapien
ttgctgtagagataacccttgaaatcagggaga

SEQ ID NO: 1065846 - DNA, 33 bp, Homo sapien
ttgctgtagagataactcttgaaatcagggaga

SEQ ID NO: 1065847 - DNA, 33 bp, Homo sapien
tgtagtaaccatgatgcaaaatagaactcttga

SEQ ID NO: 1065848 - DNA, 33 bp, Homo sapien
tgtagtaaccatgatgtaaaatagaactcttga

SEQ ID NO: 1065849 - DNA, 33 bp, Homo sapien
aaccctgctacaaggaaagagaaaagaacagct

SEQ ID NO: 1065850 - DNA, 33 bp, Homo sapien
aaccctgctacaaggacagagaaaagaacagct

SEQ ID NO: 1065851 - DNA, 33 bp, Homo sapien
tgacagaactattgtgcacctttactgtattga

SEQ ID NO: 1065852 - DNA, 33 bp, Homo sapien
tgacagaactattgtgtacctttactgtattga

SEQ ID NO: 1065853 - DNA, 33 bp, Homo sapien
atcagtgcttctacgaaaatggctaaaataaaa

SEQ ID NO: 1065854 - DNA, 33 bp, Homo sapien
atcagtgcttctacgagaatggctaaaataaaa

SEQ ID NO: 1065855 - DNA, 33 bp, Homo sapien
aaaagatctgaaaaaacgtggataaatgttgtg

SEQ ID NO: 1065856 - DNA, 33 bp, Homo sapien
aaaagatctgaaaaaatgtggataaatgttgtg

SEQ ID NO: 1065857 - DNA, 33 bp, Homo sapien
ccacattggcagacaccaggtaagtgagttaat

SEQ ID NO: 1065858 - DNA, 33 bp, Homo sapien
ccacattggcagacacgaggtaagtgagttaat

SEQ ID NO: 1065859 - DNA, 33 bp, Homo sapien
acccagcacagattggcaactactagctctaaa

SEQ ID NO: 1065860 - DNA, 33 bp, Homo sapien
acccagcacagattggtaactactagctctaaa

SEQ ID NO: 1065861 - DNA, 33 bp, Homo sapien
aggggtacatatgtagaatttgcaggtttgtta

SEQ ID NO: 1065862 - DNA, 33 bp, Homo sapien
aggggtacatatgtaggatttgcaggtttgtta

SEQ ID NO: 1065863 - DNA, 33 bp, Homo sapien
gtgtcatccacagaaacgataattgaatccagg

SEQ ID NO: 1065864 - DNA, 33 bp, Homo sapien
gtgtcatccacagaaatgataattgaatccagg

SEQ ID NO: 1065865 - DNA, 33 bp, Homo sapien
tatttttcacactacaagtataacctcgacctc

SEQ ID NO: 1065866 - DNA, 33 bp, Homo sapien
tatttttcacactacaggtataacctcgacctc

SEQ ID NO: 1065867 - DNA, 33 bp, Homo sapien
ctccttctgaaatgcccattaggtgaatatatg

SEQ ID NO: 1065868 - DNA, 33 bp, Homo sapien
ctccttctgaaatgcctattaggtgaatatatg

SEQ ID NO: 1065869 - DNA, 33 bp, Homo sapien; identical to SEQ ID NO: 1065867

SEQ ID NO: 1065870 - DNA, 33 bp, Homo sapien; identical to SEQ ID NO: 1065868

SEQ ID NO: 1065871 - DNA, 33 bp, Homo sapien
gatggccggatcgggaaagtttgctacctcctc

SEQ ID NO: 1065872 - DNA, 33 bp, Homo sapien
gatggccggatcgggatagtttgctacctcctc

SEQ ID NO: 1065873 - DNA, 33 bp, Homo sapien
agtatgtatgttaacaatgtgggtggtcacatc

SEQ ID NO: 1065874 - DNA, 33 bp, Homo sapien
agtatgtatgttaacattgtgggtggtcacatc

SEQ ID NO: 1065875 - DNA, 33 bp, Homo sapien
tatgaactatcagggaaaattacgatattattt

SEQ ID NO: 1065876 - DNA, 33 bp, Homo sapien
tatgaactatcagggacaattacgatattattt

SEQ ID NO: 1065877 - DNA, 33 bp, Homo sapien
ttccagaaataataccggaggagaactacaaac

SEQ ID NO: 1065878 - DNA, 33 bp, Homo sapien
ttccagaaataatacctgaggagaactacaaac

SEQ ID NO: 1065879 - DNA, 33 bp, Homo sapien
atatccatctgactaacggttaatatcaagaat

SEQ ID NO: 1065880 - DNA, 33 bp, Homo sapien
atatccatctgactaatggttaatatcaagaat

SEQ ID NO: 1065881 - DNA, 33 bp, Homo sapien
atatatcttattttccaaagtgtacttctgagt

SEQ ID NO: 1065882 - DNA, 33 bp, Homo sapien
atatatcttattttccgaagtgtacttctgagt

SEQ ID NO: 1065883 - DNA, 33 bp, Homo sapien
aggctgtttttgcataacaacgggaagtagtct

SEQ ID NO: 1065884 - DNA, 33 bp, Homo sapien
aggctgtttttgcatagcaacgggaagtagtct

SEQ ID NO: 1065885 - DNA, 33 bp, Homo sapien
caactgcaatcattaaactaaatttgttgtagt

SEQ ID NO: 1065886 - DNA, 33 bp, Homo sapien
caactgcaatcattaagctaaatttgttgtagt

SEQ ID NO: 1065887 - DNA, 33 bp, Homo sapien
ttatacaaagacacataagatttctatgaactg

SEQ ID NO: 1065888 - DNA, 33 bp, Homo sapien
ttatacaaagacacatcagatttctatgaactg

SEQ ID NO: 1065889 - DNA, 33 bp, Homo sapien
ttttctgttaagagcacatgaatgttctgagaa

SEQ ID NO: 1065890 - DNA, 33 bp, Homo sapien
ttttctgttaagagcagatgaatgttctgagaa

SEQ ID NO: 1065891 - DNA, 33 bp, Homo sapien
tctgtttggccatatgccagccgaaatttgggt

SEQ ID NO: 1065892 - DNA, 33 bp, Homo sapien
tctgtttggccatatgtcagccgaaatttgggt

SEQ ID NO: 1065893 - DNA, 33 bp, Homo sapien
tagtttgatttggtggaaaatgttaatgataag

SEQ ID NO: 1065894 - DNA, 33 bp, Homo sapien
tagtttgatttggtgggaaatgttaatgataag

SEQ ID NO: 1065895 - DNA, 33 bp, Homo sapien
ataaagtgttaaaaaggattccaatttctgttt

SEQ ID NO: 1065896 - DNA, 33 bp, Homo sapien
ataaagtgttaaaaagtattccaatttctgttt

SEQ ID NO: 1065897 - DNA, 33 bp, Homo sapien
atctgtaaatcaataaagcagaactacatctct

SEQ ID NO: 1065898 - DNA, 33 bp, Homo sapien
atctgtaaatcaataaggcagaactacatctct

SEQ ID NO: 1065899 - DNA, 33 bp, Homo sapien
agttaattatggtggacatattttcactatgga

SEQ ID NO: 1065900 - DNA, 33 bp, Homo sapien
agttaattatggtggagatattttcactatgga

SEQ ID NO: 1065901 - DNA, 33 bp, Homo sapien
agaaactgaattcaatcaaaggagcagaactag

SEQ ID NO: 1065902 - DNA, 33 bp, Homo sapien
agaaactgaattcaatgaaaggagcagaactag

SEQ ID NO: 1065903 - DNA, 33 bp, Homo sapien
cagatggccttcatcaaatttgcagccagccac

SEQ ID NO: 1065904 - DNA, 33 bp, Homo sapien
cagatggccttcatcagatttgcagccagccac

SEQ ID NO: 1065905 - DNA, 33 bp, Homo sapien
ggagctatataacgaaaacacatgaaaacaaag

SEQ ID NO: 1065906 - DNA, 33 bp, Homo sapien
ggagctatataacgaagacacatgaaaacaaag

SEQ ID NO: 1065907 - DNA, 33 bp, Homo sapien
ttgtataccccatagcacctcacttaagactgc

SEQ ID NO: 1065908 - DNA, 33 bp, Homo sapien
ttgtataccccatagcgcctcacttaagactgc

SEQ ID NO: 1065909 - DNA, 33 bp, Homo sapien
ctgacagctttgttgaaatatgttggtgcttgt

SEQ ID NO: 1065910 - DNA, 33 bp, Homo sapien
ctgacagctttgttgatatatgttggtgcttgt

SEQ ID NO: 1065911 - DNA, 33 bp, Homo sapien
ttctgtatttcagttcaatatattccaaaccgt

SEQ ID NO: 1065912 - DNA, 33 bp, Homo sapien
ttctgtatttcagttccatatattccaaaccgt

SEQ ID NO: 1065913 - DNA, 33 bp, Homo sapien
tagaatgatttataccaacagtctaaaagaagt

SEQ ID NO: 1065914 - DNA, 33 bp, Homo sapien
tagaatgatttataccgacagtctaaaagaagt

SEQ ID NO: 1065915 - DNA, 33 bp, Homo sapien
cctggtttttgtatcagctggttactttccata

SEQ ID NO: 1065916 - DNA, 33 bp, Homo sapien
cctggtttttgtatcatctggttactttccata

SEQ ID NO: 1065917 - DNA, 33 bp, Homo sapien
actgctgcattaatataactttgcatatgactt

SEQ ID NO: 1065918 - DNA, 33 bp, Homo sapien
actgctgcattaatatgactttgcatatgactt

SEQ ID NO: 1065919 - DNA, 33 bp, Homo sapien
ttcagtatcttaaggaagaaggttatcactttt

SEQ ID NO: 1065920 - DNA, 33 bp, Homo sapien
ttcagtatcttaaggaggaaggttatcactttt

SEQ ID NO: 1065921 - DNA, 33 bp, Homo sapien
cctaatattctcagagaaccaatttcgacttct

SEQ ID NO: 1065922 - DNA, 33 bp, Homo sapien
cctaatattctcagaggaccaatttcgacttct

SEQ ID NO: 1065923 - DNA, 33 bp, Homo sapien
ctgcaaagttggcaccacgtggatactaccgag

SEQ ID NO: 1065924 - DNA, 33 bp, Homo sapien
ctgcaaagttggcaccgcgtggatactaccgag

SEQ ID NO: 1065925 - DNA, 33 bp, Homo sapien
aaactgcatctacctacagccaaaagtgaagat

SEQ ID NO: 1065926 - DNA, 33 bp, Homo sapien
aaactgcatctacctagagccaaaagtgaagat

SEQ ID NO: 1065927 - DNA, 33 bp, Homo sapien
gttaacagcttgtataagacaacatcaggaagc

SEQ ID NO: 1065928 - DNA, 33 bp, Homo sapien
gttaacagcttgtatatgacaacatcaggaagc

SEQ ID NO: 1065929 - DNA, 33 bp, Homo sapien
agtttcttaagcagaaaggaatgctcttgcctc

SEQ ID NO: 1065930 - DNA, 33 bp, Homo sapien
agtttcttaagcagaagggaatgctcttgcctc

SEQ ID NO: 1065931 - DNA, 33 bp, Homo sapien
gtcagggacttggaaagaacataattcgacaat

SEQ ID NO: 1065932 - DNA, 33 bp, Homo sapien
gtcagggacttggaaataacataattcgacaat

SEQ ID NO: 1065933 - DNA, 33 bp, Homo sapien
gactggaagacttaaaatttaagggtgtcacca

SEQ ID NO: 1065934 - DNA, 33 bp, Homo sapien
gactggaagacttaaagtttaagggtgtcacca

SEQ ID NO: 1065935 - DNA, 33 bp, Homo sapien
ctcaataaaaggcaacaacgcttgaccaaactt

SEQ ID NO: 1065936 - DNA, 33 bp, Homo sapien
ctcaataaaaggcaacgacgcttgaccaaactt

SEQ ID NO: 1065937 - DNA, 33 bp, Homo sapien
tcctgggaatgcagccaagaaggtttcagcctc

SEQ ID NO: 1065938 - DNA, 33 bp, Homo sapien
tcctgggaatgcagcccagaaggtttcagcctc

SEQ ID NO: 1065939 - DNA, 33 bp, Homo sapien
caagctaaggattcaccgtcagacttgtgcttg

SEQ ID NO: 1065940 - DNA, 33 bp, Homo sapien
caagctaaggattcactgtcagacttgtgcttg

SEQ ID NO: 1065941 - DNA, 33 bp, Homo sapien
cttcccactgcttggccatgatatattaatata

SEQ ID NO: 1065942 - DNA, 33 bp, Homo sapien
cttcccactgcttggctatgatatattaatata

SEQ ID NO: 1065943 - DNA, 33 bp, Homo sapien
cttctcgactttgagaacttagctaaaatttct

SEQ ID NO: 1065944 - DNA, 33 bp, Homo sapien
cttctcgactttgagagcttagctaaaatttct

SEQ ID NO: 1065945 - DNA, 33 bp, Homo sapien
caaacttctgaaaagcagctttaagaggaagag

SEQ ID NO: 1065946 - DNA, 33 bp, Homo sapien
caaacttctgaaaagcggctttaagaggaagag

SEQ ID NO: 1065947 - DNA, 33 bp, Homo sapien
aaagtgttctaagacacagtttccctcctgtga

SEQ ID NO: 1065948 - DNA, 33 bp, Homo sapien
aaagtgttctaagacatagtttccctcctgtga

SEQ ID NO: 1065949 - DNA, 33 bp, Homo sapien
cctatcattaaactacccttgaattgctgggat

SEQ ID NO: 1065950 - DNA, 33 bp, Homo sapien
cctatcattaaactactcttgaattgctgggat

SEQ ID NO: 1065951 - DNA, 33 bp, Homo sapien
ctgggttacaaggaggaccaaatgcaagtatta

SEQ ID NO: 1065952 - DNA, 33 bp, Homo sapien
ctgggttacaaggaggcccaaatgcaagtatta

SEQ ID NO: 1065953 - DNA, 33 bp, Homo sapien
attttctccctctgtaagctcttttgtaccttt

SEQ ID NO: 1065954 - DNA, 33 bp, Homo sapien
attttctccctctgtaggctcttttgtaccttt

SEQ ID NO: 1065955 - DNA, 33 bp, Homo sapien
cttataaatatagatgaaaaatgcttttatttt

SEQ ID NO: 1065956 - DNA, 33 bp, Homo sapien
cttataaatatagatgcaaaatgcttttatttt

SEQ ID NO: 1065957 - DNA, 33 bp, Homo sapien
tgcccccaccagtgccgaatctaaaatcctatc

SEQ ID NO: 1065958 - DNA, 33 bp, Homo sapien
tgcccccaccagtgcctaatctaaaatcctatc

SEQ ID NO: 1065959 - DNA, 33 bp, Homo sapien
cttccttcctctgcgaaatgtgtgaatgtgcta

SEQ ID NO: 1065960 - DNA, 33 bp, Homo sapien
cttccttcctctgcgagatgtgtgaatgtgcta

SEQ ID NO: 1065961 - DNA, 33 bp, Homo sapien
ctgagggagcagtaaacgttttaactgtgggtg

SEQ ID NO: 1065962 - DNA, 33 bp, Homo sapien
ctgagggagcagtaaaggttttaactgtgggtg

SEQ ID NO: 1065963 - DNA, 33 bp, Homo sapien
ttcttctcagtcctcaaacattacttgtgtcaa

SEQ ID NO: 1065964 - DNA, 33 bp, Homo sapien
ttcttctcagtcctcacacattacttgtgtcaa

SEQ ID NO: 1065965 - DNA, 33 bp, Homo sapien
attagctcccttatcaaccttgtcttactcatc

SEQ ID NO: 1065966 - DNA, 33 bp, Homo sapien
attagctcccttatcacccttgtcttactcatc

SEQ ID NO: 1065967 - DNA, 33 bp, Homo sapien
ggtattcttgcccaaactgcataatctcaatca

SEQ ID NO: 1065968 - DNA, 33 bp, Homo sapien
ggtattcttgcccaaattgcataatctcaatca

SEQ ID NO: 1065969 - DNA, 33 bp, Homo sapien
atgatagggttttgtacgaccaactctcctggg

SEQ ID NO: 1065970 - DNA, 33 bp, Homo sapien
atgatagggttttgtaggaccaactctcctggg

SEQ ID NO: 1065971 - DNA, 33 bp, Homo sapien
tgcagattactaatatgaaacatttgcacactg

SEQ ID NO: 1065972 - DNA, 33 bp, Homo sapien
tgcagattactaatattaaacatttgcacactg

SEQ ID NO: 1065973 - DNA, 33 bp, Homo sapien
tactcagatttcgtcacctttaatgcagtcatt

SEQ ID NO: 1065974 - DNA, 33 bp, Homo sapien
tactcagatttcgtcagctttaatgcagtcatt

SEQ ID NO: 1065975 - DNA, 33 bp, Homo sapien
taatgctatctaacaaatcaagtctgtaaattc

SEQ ID NO: 1065976 - DNA, 33 bp, Homo sapien
taatgctatctaacaattcaagtctgtaaattc

SEQ ID NO: 1065977 - DNA, 33 bp, Homo sapien
agtagtaattactcggaaagctgaggaaagaga

SEQ ID NO: 1065978 - DNA, 33 bp, Homo sapien
agtagtaattactcgggaagctgaggaaagaga

SEQ ID NO: 1065979 - DNA, 33 bp, Homo sapien
aatcaacatggaaaagcatttgttaatcttgca

SEQ ID NO: 1065980 - DNA, 33 bp, Homo sapien
aatcaacatggaaaagtatttgttaatcttgca

SEQ ID NO: 1065981 - DNA, 33 bp, Homo sapien
tcattttctaaaacggcacagcgtagcaagcca

SEQ ID NO: 1065982 - DNA, 33 bp, Homo sapien
tcattttctaaaacggtacagcgtagcaagcca

SEQ ID NO: 1065983 - DNA, 33 bp, Homo sapien
atatttaaaaagatgaactacctattcatatat

SEQ ID NO: 1065984 - DNA, 33 bp, Homo sapien
atatttaaaaagatgagctacctattcatatat

SEQ ID NO: 1065985 - DNA, 33 bp, Homo sapien
aaagttggaaacaagggataccctaagagtaga

SEQ ID NO: 1065986 - DNA, 33 bp, Homo sapien
aaagttggaaacaaggtataccctaagagtaga

SEQ ID NO: 1065987 - DNA, 33 bp, Homo sapien
tggccctgtgtcaaaactaagaacataaatgct

SEQ ID NO: 1065988 - DNA, 33 bp, Homo sapien
tggccctgtgtcaaaattaagaacataaatgct

SEQ ID NO: 1065989 - DNA, 33 bp, Homo sapien
tgaatgaagaaggataacaaaaattgagggatg

SEQ ID NO: 1065990 - DNA, 33 bp, Homo sapien
tgaatgaagaaggatagcaaaaattgagggatg

SEQ ID NO: 1065991 - DNA, 33 bp, Homo sapien
gatttctctcctaatacgatgcactgggaaaga

SEQ ID NO: 1065992 - DNA, 33 bp, Homo sapien
gatttctctcctaatatgatgcactgggaaaga

SEQ ID NO: 1065993 - DNA, 33 bp, Homo sapien
gagtcagaccttggacactattgcactgaacca

SEQ ID NO: 1065994 - DNA, 33 bp, Homo sapien
gagtcagaccttggaccctattgcactgaacca

SEQ ID NO: 1065995 - DNA, 33 bp, Homo sapien
accttagcatcaggaaagacattgaaaaagtag

SEQ ID NO: 1065996 - DNA, 33 bp, Homo sapien
accttagcatcaggaaggacattgaaaaagtag

SEQ ID NO: 1065997 - DNA, 33 bp, Homo sapien
ggagatagacagtggcaatggttgtaaaacatg

SEQ ID NO: 1065998 - DNA, 33 bp, Homo sapien
ggagatagacagtggcgatggttgtaaaacatg

SEQ ID NO: 1065999 - DNA, 33 bp, Homo sapien
atgtctgaggagagataagtttgtagcaggatg

SEQ ID NO: 1066000 - DNA, 33 bp, Homo sapien
atgtctgaggagagatgagtttgtagcaggatg

SEQ ID NO: 1066001 - DNA, 33 bp, Homo sapien
ttgttacaaggtgagaataagtccctctttctg

SEQ ID NO: 1066002 - DNA, 33 bp, Homo sapien
ttgttacaaggtgagactaagtccctctttctg

SEQ ID NO: 1066003 - DNA, 33 bp, Homo sapien
tcaatctgattcataacagtgcagtaacttctg

SEQ ID NO: 1066004 - DNA, 33 bp, Homo sapien
tcaatctgattcataatagtgcagtaacttctg

SEQ ID NO: 1066005 - DNA, 33 bp, Homo sapien
ataagccatttcctacaatcctggataagtgct

SEQ ID NO: 1066006 - DNA, 33 bp, Homo sapien
ataagccatttcctaccatcctggataagtgct

SEQ ID NO: 1066007 - DNA, 33 bp, Homo sapien
aggcttgtgctactgaaaggagacaacctgctg

SEQ ID NO: 1066008 - DNA, 33 bp, Homo sapien
aggcttgtgctactgagaggagacaacctgctg

SEQ ID NO: 1066009 - DNA, 33 bp, Homo sapien
attctgaatggagggcaagtagtatcactttca

SEQ ID NO: 1066010 - DNA, 33 bp, Homo sapien
attctgaatggagggcgagtagtatcactttca

SEQ ID NO: 1066011 - DNA, 33 bp, Homo sapien
tcacaccttaaggctacgtttgggttgaaagca

SEQ ID NO: 1066012 - DNA, 33 bp, Homo sapien
tcacaccttaaggctatgtttgggttgaaagca

SEQ ID NO: 1066013 - DNA, 33 bp, Homo sapien
gaagaattccctgcccaagatccaattttcacc

SEQ ID NO: 1066014 - DNA, 33 bp, Homo sapien
gaagaattccctgcccgagatccaattttcacc

SEQ ID NO: 1066015 - DNA, 33 bp, Homo sapien
ttacttttgactacctaagatgaccagattatg

SEQ ID NO: 1066016 - DNA, 33 bp, Homo sapien
ttacttttgactacctgagatgaccagattatg

SEQ ID NO: 1066017 - DNA, 33 bp, Homo sapien
acatcctgactcaaaacccacaagcaggtctcc

SEQ ID NO: 1066018 - DNA, 33 bp, Homo sapien
acatcctgactcaaaatccacaagcaggtctcc

SEQ ID NO: 1066019 - DNA, 33 bp, Homo sapien
ttcagctgcttttacccgctattttctgaaggt

SEQ ID NO: 1066020 - DNA, 33 bp, Homo sapien
ttcagctgcttttacctgctattttctgaaggt

SEQ ID NO: 1066021 - DNA, 33 bp, Homo sapien
acaaaaaatctctgaaacatgtatagtctaata

SEQ ID NO: 1066022 - DNA, 33 bp, Homo sapien
acaaaaaatctctgaagcatgtatagtctaata

SEQ ID NO: 1066023 - DNA, 33 bp, Homo sapien
acctagaactggacaacagataaagacctttct

SEQ ID NO: 1066024 - DNA, 33 bp, Homo sapien
acctagaactggacaatagataaagacctttct

SEQ ID NO: 1066025 - DNA, 33 bp, Homo sapien
aagtagccaaccttccagagcaatcttcccact

SEQ ID NO: 1066026 - DNA, 33 bp, Homo sapien
aagtagccaaccttccggagcaatcttcccact

SEQ ID NO: 1066027 - DNA, 33 bp, Homo sapien
ggtcttgattgctttacctcagaacttcctaac

SEQ ID NO: 1066028 - DNA, 33 bp, Homo sapien
ggtcttgattgctttagctcagaacttcctaac

SEQ ID NO: 1066029 - DNA, 33 bp, Homo sapien
gcactacactttccatcacataatcagccaatg

SEQ ID NO: 1066030 - DNA, 33 bp, Homo sapien
gcactacactttccattacataatcagccaatg

SEQ ID NO: 1066031 - DNA, 33 bp, Homo sapien
ttagcacataactactcaatccatcatacccgt

SEQ ID NO: 1066032 - DNA, 33 bp, Homo sapien
ttagcacataactactgaatccatcatacccgt

SEQ ID NO: 1066033 - DNA, 33 bp, Homo sapien
catttgcttgcagccaaaagatgaattagtgcc

SEQ ID NO: 1066034 - DNA, 33 bp, Homo sapien
catttgcttgcagccagaagatgaattagtgcc

SEQ ID NO: 1066035 - DNA, 33 bp, Homo sapien
aggcttagctgtgagacagtgctaggtcaacca

SEQ ID NO: 1066036 - DNA, 33 bp, Homo sapien
aggcttagctgtgagatagtgctaggtcaacca

SEQ ID NO: 1066037 - DNA, 33 bp, Homo sapien
caacaacagaggcacacaacattggggtaagtg

SEQ ID NO: 1066038 - DNA, 33 bp, Homo sapien
caacaacagaggcacagaacattggggtaagtg

SEQ ID NO: 1066039 - DNA, 33 bp, Homo sapien
aatgtgtaacagggccagatgggcaaaaaagag

SEQ ID NO: 1066040 - DNA, 33 bp, Homo sapien
aatgtgtaacagggccggatgggcaaaaaagag

SEQ ID NO: 1066041 - DNA, 33 bp, Homo sapien
tagtctgattccattcaaaaatctaataaaagg

SEQ ID NO: 1066042 - DNA, 33 bp, Homo sapien
tagtctgattccattcgaaaatctaataaaagg

SEQ ID NO: 1066043 - DNA, 33 bp, Homo sapien
ggttgcataacatcccaaatgaaattaatgcta

SEQ ID NO: 1066044 - DNA, 33 bp, Homo sapien
ggttgcataacatcccgaatgaaattaatgcta

SEQ ID NO: 1066045 - DNA, 33 bp, Homo sapien
aagttctggacctacagtgaggaccatcacaca

SEQ ID NO: 1066046 - DNA, 33 bp, Homo sapien
aagttctggacctacattgaggaccatcacaca

SEQ ID NO: 1066047 - DNA, 33 bp, Homo sapien
caagagaatagcatggccatagcacacaaacag

SEQ ID NO: 1066048 - DNA, 33 bp, Homo sapien
caagagaatagcatggtcatagcacacaaacag

SEQ ID NO: 1066049 - DNA, 33 bp, Homo sapien
gaagcccagaaaactactaaagagaacaagcct

SEQ ID NO: 1066050 - DNA, 33 bp, Homo sapien
gaagcccagaaaactattaaagagaacaagcct

SEQ ID NO: 1066051 - DNA, 33 bp, Homo sapien
cagtgaaaaccaaataaccttcttcttgcaaag

SEQ ID NO: 1066052 - DNA, 33 bp, Homo sapien
cagtgaaaaccaaatatccttcttcttgcaaag

SEQ ID NO: 1066053 - DNA, 33 bp, Homo sapien
ttgagtattaaagagaagctcaaaagaatgctc

SEQ ID NO: 1066054 - DNA, 33 bp, Homo sapien
ttgagtattaaagagatgctcaaaagaatgctc

SEQ ID NO: 1066055 - DNA, 33 bp, Homo sapien
attacaggaatccttaaccaagaggatgcatta

SEQ ID NO: 1066056 - DNA, 33 bp, Homo sapien
attacaggaatccttatccaagaggatgcatta

SEQ ID NO: 1066057 - DNA, 33 bp, Homo sapien
aatacccaggaagcagacaggtaaagtattatc

SEQ ID NO: 1066058 - DNA, 33 bp, Homo sapien
aatacccaggaagcagccaggtaaagtattatc

SEQ ID NO: 1066059 - DNA, 33 bp, Homo sapien
catttgacatgaagaacatatggagtagaatta

SEQ ID NO: 1066060 - DNA, 33 bp, Homo sapien
catttgacatgaagaatatatggagtagaatta

SEQ ID NO: 1066061 - DNA, 33 bp, Homo sapien
aatgcatgggattgctaaaatatgggtcctgaa

SEQ ID NO: 1066062 - DNA, 33 bp, Homo sapien
aatgcatgggattgctgaaatatgggtcctgaa

SEQ ID NO: 1066063 - DNA, 33 bp, Homo sapien
agttggaagaaagatgaataattaacacaaggc

SEQ ID NO: 1066064 - DNA, 33 bp, Homo sapien
agttggaagaaagatgtataattaacacaaggc

SEQ ID NO: 1066065 - DNA, 33 bp, Homo sapien
aggaagaaagaatagtaaaaggtcacaagaagg

SEQ ID NO: 1066066 - DNA, 33 bp, Homo sapien
aggaagaaagaatagtgaaaggtcacaagaagg

SEQ ID NO: 1066067 - DNA, 33 bp, Homo sapien
ttaatttttatcactagatggtatctttggagg

SEQ ID NO: 1066068 - DNA, 33 bp, Homo sapien
ttaatttttatcactatatggtatctttggagg

SEQ ID NO: 1066069 - DNA, 33 bp, Homo sapien
cactggatagagctcactacttctgaatcagtc

SEQ ID NO: 1066070 - DNA, 33 bp, Homo sapien
cactggatagagctcattacttctgaatcagtc

SEQ ID NO: 1066071 - DNA, 33 bp, Homo sapien
gtgctttacctgaaagaaggtatctttttctct

SEQ ID NO: 1066072 - DNA, 33 bp, Homo sapien
gtgctttacctgaaagtaggtatctttttctct

SEQ ID NO: 1066073 - DNA, 33 bp, Homo sapien
gctgaccagttctctaataatagaaagtagtga

SEQ ID NO: 1066074 - DNA, 33 bp, Homo sapien
gctgaccagttctctagtaatagaaagtagtga

SEQ ID NO: 1066075 - DNA, 33 bp, Homo sapien
gttagcacggttataaacttttatccaatctca

SEQ ID NO: 1066076 - DNA, 33 bp, Homo sapien
gttagcacggttataagcttttatccaatctca

SEQ ID NO: 1066077 - DNA, 33 bp, Homo sapien
atgtatggcttatgcaatctagtgaaaacagaa

SEQ ID NO: 1066078 - DNA, 33 bp, Homo sapien
atgtatggcttatgcagtctagtgaaaacagaa

SEQ ID NO: 1066079 - DNA, 33 bp, Homo sapien
cttctcttctgtgttacgaagctctttgagaat

SEQ ID NO: 1066080 - DNA, 33 bp, Homo sapien
cttctcttctgtgttatgaagctctttgagaat

SEQ ID NO: 1066081 - DNA, 33 bp, Homo sapien
gcatagacttccgttccattaaagccagagtct

SEQ ID NO: 1066082 - DNA, 33 bp, Homo sapien
gcatagacttccgttctattaaagccagagtct

SEQ ID NO: 1066083 - DNA, 33 bp, Homo sapien
cctccagttagcggtcaagtcagatatcacagg

SEQ ID NO: 1066084 - DNA, 33 bp, Homo sapien
cctccagttagcggtcgagtcagatatcacagg

SEQ ID NO: 1066085 - DNA, 33 bp, Homo sapien
cctgacaatcagagtagggactacaagagtgta

SEQ ID NO: 1066086 - DNA, 33 bp, Homo sapien
cctgacaatcagagtatggactacaagagtgta

SEQ ID NO: 1066087 - DNA, 33 bp, Homo sapien
cacatttactatccataagaaagtgcaagcaag

SEQ ID NO: 1066088 - DNA, 33 bp, Homo sapien
cacatttactatccattagaaagtgcaagcaag

SEQ ID NO: 1066089 - DNA, 33 bp, Homo sapien
gcatttctccacgtaaacccttcaccttccttg

SEQ ID NO: 1066090 - DNA, 33 bp, Homo sapien
gcatttctccacgtaatcccttcaccttccttg

SEQ ID NO: 1066091 - DNA, 33 bp, Homo sapien
cttcctctgtacctatcaggatgcattttattt

SEQ ID NO: 1066092 - DNA, 33 bp, Homo sapien
cttcctctgtacctattaggatgcattttattt

SEQ ID NO: 1066093 - DNA, 33 bp, Homo sapien
gtcatgatacaatccaatgacttttcttcttcc

SEQ ID NO: 1066094 - DNA, 33 bp, Homo sapien
gtcatgatacaatccagtgacttttcttcttcc

SEQ ID NO: 1066095 - DNA, 33 bp, Homo sapien
tgtgatttttcatccaatgcctacaagggcctg

SEQ ID NO: 1066096 - DNA, 33 bp, Homo sapien
tgtgatttttcatccactgcctacaagggcctg

SEQ ID NO: 1066097 - DNA, 33 bp, Homo sapien
cctgaaattggaataactgagtttaatcatcac

SEQ ID NO: 1066098 - DNA, 33 bp, Homo sapien
cctgaaattggaataattgagtttaatcatcac

SEQ ID NO: 1066099 - DNA, 33 bp, Homo sapien
atctcatttaaacctaacaatagtcatgtgaga

SEQ ID NO: 1066100 - DNA, 33 bp, Homo sapien
atctcatttaaacctagcaatagtcatgtgaga

SEQ ID NO: 1066101 - DNA, 33 bp, Homo sapien
agaagactcagtatagcaacaatgtcaattatc

SEQ ID NO: 1066102 - DNA, 33 bp, Homo sapien
agaagactcagtatagtaacaatgtcaattatc

SEQ ID NO: 1066103 - DNA, 33 bp, Homo sapien
gtgatgatgtagaaaaactgagtcactcatact

SEQ ID NO: 1066104 - DNA, 33 bp, Homo sapien
gtgatgatgtagaaaagctgagtcactcatact

SEQ ID NO: 1066105 - DNA, 33 bp, Homo sapien
ttgtttgcttggtttaagtcaaaactatttggc

SEQ ID NO: 1066106 - DNA, 33 bp, Homo sapien
ttgtttgcttggtttaggtcaaaactatttggc

SEQ ID NO: 1066107 - DNA, 33 bp, Homo sapien
tttaatctgtcagtcaaagctaaaaaatgactt

SEQ ID NO: 1066108 - DNA, 33 bp, Homo sapien
tttaatctgtcagtcatagctaaaaaatgactt

SEQ ID NO: 1066109 - DNA, 33 bp, Homo sapien
cctcttgaatctgaacagacttttacatcatga

SEQ ID NO: 1066110 - DNA, 33 bp, Homo sapien
cctcttgaatctgaactgacttttacatcatga

SEQ ID NO: 1066111 - DNA, 33 bp, Homo sapien
gtggtgctttgaaggccacaatgggagatgagt

SEQ ID NO: 1066112 - DNA, 33 bp, Homo sapien
gtggtgctttgaaggctacaatgggagatgagt

SEQ ID NO: 1066113 - DNA, 33 bp, Homo sapien
tacttaagaccacaaaaagactaaactgctggc

SEQ ID NO: 1066114 - DNA, 33 bp, Homo sapien
tacttaagaccacaaagagactaaactgctggc

SEQ ID NO: 1066115 - DNA, 33 bp, Homo sapien
tacaatttctgtcttacgatggactactgctgg

SEQ ID NO: 1066116 - DNA, 33 bp, Homo sapien
tacaatttctgtcttatgatggactactgctgg

SEQ ID NO: 1066117 - DNA, 33 bp, Homo sapien
gtatatgatatggttaagttcagtgccccaccc

SEQ ID NO: 1066118 - DNA, 33 bp, Homo sapien
gtatatgatatggttaggttcagtgccccaccc

SEQ ID NO: 1066119 - DNA, 33 bp, Homo sapien
aggataattccagaaaagacagactcagagatg

SEQ ID NO: 1066120 - DNA, 33 bp, Homo sapien
aggataattccagaaaggacagactcagagatg

SEQ ID NO: 1066121 - DNA, 33 bp, Homo sapien
aatctcagagcctctaaaacctagcattcataa

SEQ ID NO: 1066122 - DNA, 33 bp, Homo sapien
aatctcagagcctctacaacctagcattcataa

SEQ ID NO: 1066123 - DNA, 33 bp, Homo sapien
ggtagacaactgacaactgccttatactgaagg

SEQ ID NO: 1066124 - DNA, 33 bp, Homo sapien
ggtagacaactgacaagtgccttatactgaagg

SEQ ID NO: 1066125 - DNA, 33 bp, Homo sapien
cttgaccacactaaataagcactagtcttgagc

SEQ ID NO: 1066126 - DNA, 33 bp, Homo sapien
cttgaccacactaaatcagcactagtcttgagc

SEQ ID NO: 1066127 - DNA, 33 bp, Homo sapien
agactggaggagcatacggcaaaatgttaacag

SEQ ID NO: 1066128 - DNA, 33 bp, Homo sapien
agactggaggagcatatggcaaaatgttaacag

SEQ ID NO: 1066129 - DNA, 33 bp, Homo sapien
tcctatattctgtcaaccccaatattagggact

SEQ ID NO: 1066130 - DNA, 33 bp, Homo sapien
tcctatattctgtcaatcccaatattagggact

SEQ ID NO: 1066131 - DNA, 33 bp, Homo sapien
aaaaaatagacggaaaatgctgcaaggtgtgtc

SEQ ID NO: 1066132 - DNA, 33 bp, Homo sapien
aaaaaatagacggaaagtgctgcaaggtgtgtc

SEQ ID NO: 1066133 - DNA, 33 bp, Homo sapien
catggaagactttaaacgacaggctaaggggtg

SEQ ID NO: 1066134 - DNA, 33 bp, Homo sapien
catggaagactttaaatgacaggctaaggggtg

SEQ ID NO: 1066135 - DNA, 33 bp, Homo sapien
agtacatcttatcaagactatactcgaatctca

SEQ ID NO: 1066136 - DNA, 33 bp, Homo sapien
agtacatcttatcaagtctatactcgaatctca

SEQ ID NO: 1066137 - DNA, 33 bp, Homo sapien
ccgctctctcaagcagcctagttgcagctaatt

SEQ ID NO: 1066138 - DNA, 33 bp, Homo sapien
ccgctctctcaagcaggctagttgcagctaatt

SEQ ID NO: 1066139 - DNA, 33 bp, Homo sapien
gccctcatgtttgtgaaactgtactatagattt

SEQ ID NO: 1066140 - DNA, 33 bp, Homo sapien
gccctcatgtttgtgatactgtactatagattt

SEQ ID NO: 1066141 - DNA, 33 bp, Homo sapien
tattattaatgacagcaagactcttctatagct

SEQ ID NO: 1066142 - DNA, 33 bp, Homo sapien
tattattaatgacagcgagactcttctatagct

SEQ ID NO: 1066143 - DNA, 33 bp, Homo sapien
gaagtttaggtgagaacgtataaactcaaaaat

SEQ ID NO: 1066144 - DNA, 33 bp, Homo sapien
gaagtttaggtgagaatgtataaactcaaaaat

SEQ ID NO: 1066145 - DNA, 33 bp, Homo sapien
tcagggaggtgaaggaagacttctgagactgtc

SEQ ID NO: 1066146 - DNA, 33 bp, Homo sapien
tcagggaggtgaaggacgacttctgagactgtc

SEQ ID NO: 1066147 - DNA, 33 bp, Homo sapien
cagaattttaatgtgcccaatttaagtgcacta

SEQ ID NO: 1066148 - DNA, 33 bp, Homo sapien
cagaattttaatgtgctcaatttaagtgcacta

SEQ ID NO: 1066149 - DNA, 33 bp, Homo sapien
taaagtgtgagaaacactgacaggaagaggact

SEQ ID NO: 1066150 - DNA, 33 bp, Homo sapien
taaagtgtgagaaacattgacaggaagaggact

SEQ ID NO: 1066151 - DNA, 33 bp, Homo sapien
aaagtgccaatcacttcaaacctataataagga

SEQ ID NO: 1066152 - DNA, 33 bp, Homo sapien
aaagtgccaatcacttgaaacctataataagga

SEQ ID NO: 1066153 - DNA, 33 bp, Homo sapien
gggcctcttgatgtgacgacttaactagatctg

SEQ ID NO: 1066154 - DNA, 33 bp, Homo sapien
gggcctcttgatgtgatgacttaactagatctg

SEQ ID NO: 1066155 - DNA, 33 bp, Homo sapien
cctactgactctaacaaggcctgaagcactaag

SEQ ID NO: 1066156 - DNA, 33 bp, Homo sapien
cctactgactctaacagggcctgaagcactaag

SEQ ID NO: 1066157 - DNA, 33 bp, Homo sapien
aaatgcaccctttgcaataagactgtttagttt

SEQ ID NO: 1066158 - DNA, 33 bp, Homo sapien
aaatgcaccctttgcagtaagactgtttagttt

SEQ ID NO: 1066159 - DNA, 33 bp, Homo sapien
ctgtcctcatgtatagcaacataaaatagaaga

SEQ ID NO: 1066160 - DNA, 33 bp, Homo sapien
ctgtcctcatgtataggaacataaaatagaaga

SEQ ID NO: 1066161 - DNA, 33 bp, Homo sapien
tcttgaatgtttaccaagactaagtattgtttt

SEQ ID NO: 1066162 - DNA, 33 bp, Homo sapien
tcttgaatgtttaccatgactaagtattgtttt

SEQ ID NO: 1066163 - DNA, 33 bp, Homo sapien
gctgcttatcatttcacggcgtttcccatatcc

SEQ ID NO: 1066164 - DNA, 33 bp, Homo sapien
gctgcttatcatttcagggcgtttcccatatcc

SEQ ID NO: 1066165 - DNA, 33 bp, Homo sapien
ggcccataattactgacagcccattagtatttc

SEQ ID NO: 1066166 - DNA, 33 bp, Homo sapien
ggcccataattactgatagcccattagtatttc

SEQ ID NO: 1066167 - DNA, 33 bp, Homo sapien
gtggttgccaggatgccatactaccttataaag

SEQ ID NO: 1066168 - DNA, 33 bp, Homo sapien
gtggttgccaggatgctatactaccttataaag

SEQ ID NO: 1066169 - DNA, 33 bp, Homo sapien
cctgttgctgaccagaagtagattcccaaggcc

SEQ ID NO: 1066170 - DNA, 33 bp, Homo sapien
cctgttgctgaccagaggtagattcccaaggcc

SEQ ID NO: 1066171 - DNA, 33 bp, Homo sapien
aacaggttggatattcaccaaaaggcatggaat

SEQ ID NO: 1066172 - DNA, 33 bp, Homo sapien
aacaggttggatattcgccaaaaggcatggaat

SEQ ID NO: 1066173 - DNA, 33 bp, Homo sapien
acccaaagatcacacaagtactaattggaagag

SEQ ID NO: 1066174 - DNA, 33 bp, Homo sapien
acccaaagatcacacaggtactaattggaagag

SEQ ID NO: 1066175 - DNA, 33 bp, Homo sapien
taccatgacaccataacccttgtgtcctgacct

SEQ ID NO: 1066176 - DNA, 33 bp, Homo sapien
taccatgacaccataatccttgtgtcctgacct

SEQ ID NO: 1066177 - DNA, 33 bp, Homo sapien
ggtttccaaaaagtaccagaatgaggtaagcct

SEQ ID NO: 1066178 - DNA, 33 bp, Homo sapien
ggtttccaaaaagtactagaatgaggtaagcct

SEQ ID NO: 1066179 - DNA, 33 bp, Homo sapien
gaatggcataacagtaacatggctagactctac

SEQ ID NO: 1066180 - DNA, 33 bp, Homo sapien
gaatggcataacagtagcatggctagactctac

SEQ ID NO: 1066181 - DNA, 33 bp, Homo sapien
ttgacacaaatagagaactttcatttttcagta

SEQ ID NO: 1066182 - DNA, 33 bp, Homo sapien
ttgacacaaatagagagctttcatttttcagta

SEQ ID NO: 1066183 - DNA, 33 bp, Homo sapien
cccatagcactgaaaccaatgccatcaaaaata

SEQ ID NO: 1066184 - DNA, 33 bp, Homo sapien
cccatagcactgaaacgaatgccatcaaaaata

SEQ ID NO: 1066185 - DNA, 33 bp, Homo sapien
ttcttctttacagcaaaagtctgctatatttcc

SEQ ID NO: 1066186 - DNA, 33 bp, Homo sapien
ttcttctttacagcaagagtctgctatatttcc

SEQ ID NO: 1066187 - DNA, 33 bp, Homo sapien
atgaagttgcagaaagaacaataagaaaagagt

SEQ ID NO: 1066188 - DNA, 33 bp, Homo sapien
atgaagttgcagaaaggacaataagaaaagagt

SEQ ID NO: 1066189 - DNA, 33 bp, Homo sapien
acttaaccatgctgagacctagtttcttatctg

SEQ ID NO: 1066190 - DNA, 33 bp, Homo sapien
acttaaccatgctgagccctagtttcttatctg

SEQ ID NO: 1066191 - DNA, 33 bp, Homo sapien
ccatcactttgaaaacaatcattatccttccaa

SEQ ID NO: 1066192 - DNA, 33 bp, Homo sapien
ccatcactttgaaaacgatcattatccttccaa

SEQ ID NO: 1066193 - DNA, 33 bp, Homo sapien
cctggaggggtaaagcaagtcatccaagcttac

SEQ ID NO: 1066194 - DNA, 33 bp, Homo sapien
cctggaggggtaaagcgagtcatccaagcttac

SEQ ID NO: 1066195 - DNA, 33 bp, Homo sapien
tcttagacaatgtgaaagctgaaaaaaaatctc

SEQ ID NO: 1066196 - DNA, 33 bp, Homo sapien
tcttagacaatgtgaaggctgaaaaaaaatctc

SEQ ID NO: 1066197 - DNA, 33 bp, Homo sapien
tagttttacaatatcactctggccgctatataa

SEQ ID NO: 1066198 - DNA, 33 bp, Homo sapien
tagttttacaatatcattctggccgctatataa

SEQ ID NO: 1066199 - DNA, 33 bp, Homo sapien
cattctctgaactggaaaaattgaggcaatttt

SEQ ID NO: 1066200 - DNA, 33 bp, Homo sapien
cattctctgaactggacaaattgaggcaatttt

SEQ ID NO: 1066201 - DNA, 33 bp, Homo sapien
atggctgtgttggagacgggtaaaaagagtgta

SEQ ID NO: 1066202 - DNA, 33 bp, Homo sapien
atggctgtgttggagatgggtaaaaagagtgta

SEQ ID NO: 1066203 - DNA, 33 bp, Homo sapien
tcccatgctattcttggatcaacagagttggtg

SEQ ID NO: 1066204 - DNA, 33 bp, Homo sapien
tcccatgctattcttgtatcaacagagttggtg

SEQ ID NO: 1066205 - DNA, 33 bp, Homo sapien
ttccatctagatagcaaaggcctgagagtggta

SEQ ID NO: 1066206 - DNA, 33 bp, Homo sapien
ttccatctagatagcagaggcctgagagtggta

SEQ ID NO: 1066207 - DNA, 33 bp, Homo sapien
tattaaatcaaatagcaagtacagcaagtgctc

SEQ ID NO: 1066208 - DNA, 33 bp, Homo sapien
tattaaatcaaatagcgagtacagcaagtgctc

SEQ ID NO: 1066209 - DNA, 33 bp, Homo sapien
agaagggttacagaagacaatgagccctgcctt

SEQ ID NO: 1066210 - DNA, 33 bp, Homo sapien
agaagggttacagaaggcaatgagccctgcctt

SEQ ID NO: 1066211 - DNA, 33 bp, Homo sapien
ctcgctcccagttaagcaggatagccaggtggc

SEQ ID NO: 1066212 - DNA, 33 bp, Homo sapien
ctcgctcccagttaaggaggatagccaggtggc

SEQ ID NO: 1066213 - DNA, 33 bp, Homo sapien
agccctgatagcacaccgtctagaaaaaaaagt

SEQ ID NO: 1066214 - DNA, 33 bp, Homo sapien
agccctgatagcacactgtctagaaaaaaaagt

SEQ ID NO: 1066215 - DNA, 33 bp, Homo sapien
acaacctcaggcttaccaggaagtagcatcttg

SEQ ID NO: 1066216 - DNA, 33 bp, Homo sapien
acaacctcaggcttacgaggaagtagcatcttg

SEQ ID NO: 1066217 - DNA, 33 bp, Homo sapien
aatcactagggagaaaagaaatacacccatgaa

SEQ ID NO: 1066218 - DNA, 33 bp, Homo sapien
aatcactagggagaaaggaaatacacccatgaa

SEQ ID NO: 1066219 - DNA, 33 bp, Homo sapien
agagtttgggaaagtacgtatgagtgagagtgt

SEQ ID NO: 1066220 - DNA, 33 bp, Homo sapien
agagtttgggaaagtatgtatgagtgagagtgt

SEQ ID NO: 1066221 - DNA, 33 bp, Homo sapien
acatcaatgcccgtgcacttatttctgtttcct

SEQ ID NO: 1066222 - DNA, 33 bp, Homo sapien
acatcaatgcccgtgcgcttatttctgtttcct

SEQ ID NO: 1066223 - DNA, 33 bp, Homo sapien
aaaatagaactacaaaacaagtaaggatatgtg

SEQ ID NO: 1066224 - DNA, 33 bp, Homo sapien
aaaatagaactacaaaccaagtaaggatatgtg

SEQ ID NO: 1066225 - DNA, 33 bp, Homo sapien
ctcatatacatacaaaacaaagactgctgtgtg

SEQ ID NO: 1066226 - DNA, 33 bp, Homo sapien
ctcatatacatacaaagcaaagactgctgtgtg

SEQ ID NO: 1066227 - DNA, 33 bp, Homo sapien
ggaattccccatattcaagcccaccagacaaat

SEQ ID NO: 1066228 - DNA, 33 bp, Homo sapien
ggaattccccatattcgagcccaccagacaaat

SEQ ID NO: 1066229 - DNA, 33 bp, Homo sapien
ttcagatgtgaaatggacaccttccctgtagaa

SEQ ID NO: 1066230 - DNA, 33 bp, Homo sapien
ttcagatgtgaaatgggcaccttccctgtagaa

SEQ ID NO: 1066231 - DNA, 33 bp, Homo sapien
ttattgatccaccccaatgaaatatcaacaaat

SEQ ID NO: 1066232 - DNA, 33 bp, Homo sapien
ttattgatccaccccagtgaaatatcaacaaat

SEQ ID NO: 1066233 - DNA, 33 bp, Homo sapien
ataataacctctggagacaagaaagcttcctga

SEQ ID NO: 1066234 - DNA, 33 bp, Homo sapien
ataataacctctggagtcaagaaagcttcctga

SEQ ID NO: 1066235 - DNA, 33 bp, Homo sapien
agacacagtccattacacagcactgcatatcct

SEQ ID NO: 1066236 - DNA, 33 bp, Homo sapien
agacacagtccattacgcagcactgcatatcct

SEQ ID NO: 1066237 - DNA, 33 bp, Homo sapien
tagttgaatgacacaacaaaaaaaggtgtgaga

SEQ ID NO: 1066238 - DNA, 33 bp, Homo sapien
tagttgaatgacacaagaaaaaaaggtgtgaga

SEQ ID NO: 1066239 - DNA, 33 bp, Homo sapien
gggtaagtcatctcaacgaggaagaacagtaga

SEQ ID NO: 1066240 - DNA, 33 bp, Homo sapien
gggtaagtcatctcaatgaggaagaacagtaga

SEQ ID NO: 1066241 - DNA, 33 bp, Homo sapien
ctatcctatattctgcccaacttagcacctaat

SEQ ID NO: 1066242 - DNA, 33 bp, Homo sapien
ctatcctatattctgctcaacttagcacctaat

SEQ ID NO: 1066243 - DNA, 33 bp, Homo sapien
ctcatagaactagtcaaactatgtgtttatttt

SEQ ID NO: 1066244 - DNA, 33 bp, Homo sapien
ctcatagaactagtcagactatgtgtttatttt

SEQ ID NO: 1066245 - DNA, 33 bp, Homo sapien
catttcactgtaaccaagaatacactttagagt

SEQ ID NO: 1066246 - DNA, 33 bp, Homo sapien
catttcactgtaaccatgaatacactttagagt

SEQ ID NO: 1066247 - DNA, 33 bp, Homo sapien
tctttatgaaacaaaaatgacctctctattctc

SEQ ID NO: 1066248 - DNA, 33 bp, Homo sapien
tctttatgaaacaaaagtgacctctctattctc

SEQ ID NO: 1066249 - DNA, 33 bp, Homo sapien
gtattcaggtgagcaagtcctggccaccaaatt

SEQ ID NO: 1066250 - DNA, 33 bp, Homo sapien
gtattcaggtgagcaattcctggccaccaaatt

SEQ ID NO: 1066251 - DNA, 33 bp, Homo sapien
gaaatatatccggtgcacacttgagaatcttca

SEQ ID NO: 1066252 - DNA, 33 bp, Homo sapien
gaaatatatccggtgcgcacttgagaatcttca

SEQ ID NO: 1066253 - DNA, 33 bp, Homo sapien
tatatttttaacatcaatgaacctttaatgagt

SEQ ID NO: 1066254 - DNA, 33 bp, Homo sapien
tatatttttaacatcagtgaacctttaatgagt

SEQ ID NO: 1066255 - DNA, 33 bp, Homo sapien
tgattatggcttgacaatggcacttggtgggaa

SEQ ID NO: 1066256 - DNA, 33 bp, Homo sapien
tgattatggcttgacattggcacttggtgggaa

SEQ ID NO: 1066257 - DNA, 33 bp, Homo sapien
tcctgataatgaaactaacctgctttatgagga

SEQ ID NO: 1066258 - DNA, 33 bp, Homo sapien
tcctgataatgaaactgacctgctttatgagga

SEQ ID NO: 1066259 - DNA, 33 bp, Homo sapien
atccagtggtataaaactgcgacaaattactaa

SEQ ID NO: 1066260 - DNA, 33 bp, Homo sapien
atccagtggtataaaattgcgacaaattactaa

SEQ ID NO: 1066261 - DNA, 33 bp, Homo sapien
ttgcatgggctagtaaaaccctggcagtacctg

SEQ ID NO: 1066262 - DNA, 33 bp, Homo sapien
ttgcatgggctagtaataccctggcagtacctg

SEQ ID NO: 1066263 - DNA, 33 bp, Homo sapien
gagatggaaaagctgactataatgcctctcttt

SEQ ID NO: 1066264 - DNA, 33 bp, Homo sapien
gagatggaaaagctgagtataatgcctctcttt

SEQ ID NO: 1066265 - DNA, 33 bp, Homo sapien
atacatgattgattgacgtgttgcctttcttct

SEQ ID NO: 1066266 - DNA, 33 bp, Homo sapien
atacatgattgattgatgtgttgcctttcttct

SEQ ID NO: 1066267 - DNA, 33 bp, Homo sapien
agaggtaacattgaacgggaaggagtcaaacaa

SEQ ID NO: 1066268 - DNA, 33 bp, Homo sapien
agaggtaacattgaactggaaggagtcaaacaa

SEQ ID NO: 1066269 - DNA, 33 bp, Homo sapien
cttccatattgcagcacaaagcagtatttcatt

SEQ ID NO: 1066270 - DNA, 33 bp, Homo sapien
cttccatattgcagcataaagcagtatttcatt

SEQ ID NO: 1066271 - DNA, 33 bp, Homo sapien
cttttggttccaggataaatatcactaataggc

SEQ ID NO: 1066272 - DNA, 33 bp, Homo sapien
cttttggttccaggatgaatatcactaataggc

SEQ ID NO: 1066273 - DNA, 33 bp, Homo sapien
cattaattgttccacactctcccgtttgagagc

SEQ ID NO: 1066274 - DNA, 33 bp, Homo sapien
cattaattgttccacattctcccgtttgagagc

SEQ ID NO: 1066275 - DNA, 33 bp, Homo sapien
tgttttcaccaaaataagtagcttccctccagt

SEQ ID NO: 1066276 - DNA, 33 bp, Homo sapien
tgttttcaccaaaataggtagcttccctccagt

SEQ ID NO: 1066277 - DNA, 33 bp, Homo sapien
atgttatgttggaaagactgttagaaatcactt

SEQ ID NO: 1066278 - DNA, 33 bp, Homo sapien
atgttatgttggaaagtctgttagaaatcactt

SEQ ID NO: 1066279 - DNA, 33 bp, Homo sapien
tttttatcattatcacagtcctaaagagccttt

SEQ ID NO: 1066280 - DNA, 33 bp, Homo sapien
tttttatcattatcacggtcctaaagagccttt

SEQ ID NO: 1066281 - DNA, 33 bp, Homo sapien
agtctcttggcacagacgtttctgaggtggggt

SEQ ID NO: 1066282 - DNA, 33 bp, Homo sapien
agtctcttggcacagatgtttctgaggtggggt

SEQ ID NO: 1066283 - DNA, 33 bp, Homo sapien
gtgtcacatgggataacaggcacaatcagacca

SEQ ID NO: 1066284 - DNA, 33 bp, Homo sapien
gtgtcacatgggataagaggcacaatcagacca

SEQ ID NO: 1066285 - DNA, 33 bp, Homo sapien
aagaagagggaaacaccgtggcaaggaacacaa

SEQ ID NO: 1066286 - DNA, 33 bp, Homo sapien
aagaagagggaaacactgtggcaaggaacacaa

SEQ ID NO: 1066287 - DNA, 33 bp, Homo sapien
ttctttgtctcagagaccatttgttgaatgact

SEQ ID NO: 1066288 - DNA, 33 bp, Homo sapien
ttctttgtctcagagatcatttgttgaatgact

SEQ ID NO: 1066289 - DNA, 33 bp, Homo sapien
gggtggaagatgcatagagctaaataacatgag

SEQ ID NO: 1066290 - DNA, 33 bp, Homo sapien
gggtggaagatgcatatagctaaataacatgag

SEQ ID NO: 1066291 - DNA, 33 bp, Homo sapien
atccagtgaactaagacatgatgtgagctgagc

SEQ ID NO: 1066292 - DNA, 33 bp, Homo sapien
atccagtgaactaagatatgatgtgagctgagc

SEQ ID NO: 1066293 - DNA, 33 bp, Homo sapien
ctttgcagtaggagtaacactacctcaacagac

SEQ ID NO: 1066294 - DNA, 33 bp, Homo sapien
ctttgcagtaggagtagcactacctcaacagac

SEQ ID NO: 1066295 - DNA, 33 bp, Homo sapien
ttttaatgattccttcaattccttttacaaaat

SEQ ID NO: 1066296 - DNA, 33 bp, Homo sapien
ttttaatgattccttcgattccttttacaaaat

SEQ ID NO: 1066297 - DNA, 33 bp, Homo sapien
cctgtaatgttacctcactatagccaaaaactc

SEQ ID NO: 1066298 - DNA, 33 bp, Homo sapien
cctgtaatgttacctcgctatagccaaaaactc

SEQ ID NO: 1066299 - DNA, 33 bp, Homo sapien
tacttttgcagttttaacatctcactgcactgc

SEQ ID NO: 1066300 - DNA, 33 bp, Homo sapien
tacttttgcagttttagcatctcactgcactgc

SEQ ID NO: 1066301 - DNA, 33 bp, Homo sapien
agacatctatatgtacaaggacaaacattgcaa

SEQ ID NO: 1066302 - DNA, 33 bp, Homo sapien
agacatctatatgtaccaggacaaacattgcaa

SEQ ID NO: 1066303 - DNA, 33 bp, Homo sapien
caaatatttgaattgacaacctcctatgaagac

SEQ ID NO: 1066304 - DNA, 33 bp, Homo sapien
caaatatttgaattgataacctcctatgaagac

SEQ ID NO: 1066305 - DNA, 33 bp, Homo sapien
gacagtgaatcaataacgttgggttgtctaaat

SEQ ID NO: 1066306 - DNA, 33 bp, Homo sapien
gacagtgaatcaataatgttgggttgtctaaat

SEQ ID NO: 1066307 - DNA, 33 bp, Homo sapien
atatcttaggtcacataataattctcaacaaaa

SEQ ID NO: 1066308 - DNA, 33 bp, Homo sapien
atatcttaggtcacattataattctcaacaaaa

SEQ ID NO: 1066309 - DNA, 33 bp, Homo sapien
ggatagatggaagagcacattataaagccagta

SEQ ID NO: 1066310 - DNA, 33 bp, Homo sapien
ggatagatggaagagcgcattataaagccagta

SEQ ID NO: 1066311 - DNA, 33 bp, Homo sapien
tttgatttctattcctcaagaattgagcaagtg

SEQ ID NO: 1066312 - DNA, 33 bp, Homo sapien
tttgatttctattcctgaagaattgagcaagtg

SEQ ID NO: 1066313 - DNA, 33 bp, Homo sapien
gtagcttagttgattaagataattttacaaatc

SEQ ID NO: 1066314 - DNA, 33 bp, Homo sapien
gtagcttagttgattatgataattttacaaatc

SEQ ID NO: 1066315 - DNA, 33 bp, Homo sapien
tgttttaaggggcggaccttatgtgacagcctc

SEQ ID NO: 1066316 - DNA, 33 bp, Homo sapien
tgttttaaggggcggatcttatgtgacagcctc

SEQ ID NO: 1066317 - DNA, 33 bp, Homo sapien
gtgatagtgtagtaaagagacagttggaaaagc

SEQ ID NO: 1066318 - DNA, 33 bp, Homo sapien
gtgatagtgtagtaaatagacagttggaaaagc

SEQ ID NO: 1066319 - DNA, 33 bp, Homo sapien
tatgagatggtatagactccatttaggccatct

SEQ ID NO: 1066320 - DNA, 33 bp, Homo sapien
tatgagatggtatagattccatttaggccatct

SEQ ID NO: 1066321 - DNA, 33 bp, Homo sapien
tctgagaggtaccacaaggaaaaagcaaagtgg

SEQ ID NO: 1066322 - DNA, 33 bp, Homo sapien
tctgagaggtaccacagggaaaaagcaaagtgg

SEQ ID NO: 1066323 - DNA, 33 bp, Homo sapien
tgaaggcaggctcactcaatgggaacaaaattt

SEQ ID NO: 1066324 - DNA, 33 bp, Homo sapien
tgaaggcaggctcactgaatgggaacaaaattt

SEQ ID NO: 1066325 - DNA, 33 bp, Homo sapien
gtaggattggatgaaactaggcaaaccaatctt

SEQ ID NO: 1066326 - DNA, 33 bp, Homo sapien
gtaggattggatgaaagtaggcaaaccaatctt

SEQ ID NO: 1066327 - DNA, 33 bp, Homo sapien
cactggcaaagtagcaactcttaactattcaat

SEQ ID NO: 1066328 - DNA, 33 bp, Homo sapien
cactggcaaagtagcacctcttaactattcaat

SEQ ID NO: 1066329 - DNA, 33 bp, Homo sapien
ctttcataaaactggtaacagtacatagtatta

SEQ ID NO: 1066330 - DNA, 33 bp, Homo sapien
ctttcataaaactggtgacagtacatagtatta

SEQ ID NO: 1066331 - DNA, 33 bp, Homo sapien
gtcttgccaaagctagacacaacactgatgaag

SEQ ID NO: 1066332 - DNA, 33 bp, Homo sapien
gtcttgccaaagctaggcacaacactgatgaag

SEQ ID NO: 1066333 - DNA, 33 bp, Homo sapien
acatccgattgccactaaatgaggtaaaagaga

SEQ ID NO: 1066334 - DNA, 33 bp, Homo sapien
acatccgattgccactgaatgaggtaaaagaga

SEQ ID NO: 1066335 - DNA, 33 bp, Homo sapien
tgccaaaggatcataccggctctatccctcata

SEQ ID NO: 1066336 - DNA, 33 bp, Homo sapien
tgccaaaggatcatactggctctatccctcata

SEQ ID NO: 1066337 - DNA, 33 bp, Homo sapien
agggatgattaacaaacgattcttggctaaaag

SEQ ID NO: 1066338 - DNA, 33 bp, Homo sapien
agggatgattaacaaatgattcttggctaaaag

SEQ ID NO: 1066339 - DNA, 33 bp, Homo sapien
ctggactagattatctcaacctctttcagttct

SEQ ID NO: 1066340 - DNA, 33 bp, Homo sapien
ctggactagattatcttaacctctttcagttct

SEQ ID NO: 1066341 - DNA, 33 bp, Homo sapien
gaagcataactaaactcacagaacttcccaatc

SEQ ID NO: 1066342 - DNA, 33 bp, Homo sapien
gaagcataactaaacttacagaacttcccaatc

SEQ ID NO: 1066343 - DNA, 33 bp, Homo sapien
gtgccatctgaccttcaatcctaccaggttcat

SEQ ID NO: 1066344 - DNA, 33 bp, Homo sapien
gtgccatctgaccttcgatcctaccaggttcat

SEQ ID NO: 1066345 - DNA, 33 bp, Homo sapien
aagatttacagcctaactgaggaggtggcattt

SEQ ID NO: 1066346 - DNA, 33 bp, Homo sapien
aagatttacagcctaattgaggaggtggcattt

SEQ ID NO: 1066347 - DNA, 33 bp, Homo sapien
taggctccttttttcaaggctaagagatacaaa

SEQ ID NO: 1066348 - DNA, 33 bp, Homo sapien
taggctccttttttcagggctaagagatacaaa

SEQ ID NO: 1066349 - DNA, 33 bp, Homo sapien
gtccatcccactttgacaaggaatcgctccact

SEQ ID NO: 1066350 - DNA, 33 bp, Homo sapien
gtccatcccactttgagaaggaatcgctccact

SEQ ID NO: 1066351 - DNA, 33 bp, Homo sapien
gagcctttctgccttcaatcttggttcattaaa

SEQ ID NO: 1066352 - DNA, 33 bp, Homo sapien
gagcctttctgccttccatcttggttcattaaa

SEQ ID NO: 1066353 - DNA, 33 bp, Homo sapien
gttagtttctcaaagcacagagcagggcagaga

SEQ ID NO: 1066354 - DNA, 33 bp, Homo sapien
gttagtttctcaaagcgcagagcagggcagaga

SEQ ID NO: 1066355 - DNA, 33 bp, Homo sapien
tcctcactacaacaccaaaacataggcaccact

SEQ ID NO: 1066356 - DNA, 33 bp, Homo sapien
tcctcactacaacaccgaaacataggcaccact

SEQ ID NO: 1066357 - DNA, 33 bp, Homo sapien
tatctggcaccaacaacgttttgagtatgatct

SEQ ID NO: 1066358 - DNA, 33 bp, Homo sapien
tatctggcaccaacaatgttttgagtatgatct

SEQ ID NO: 1066359 - DNA, 33 bp, Homo sapien
aattggaacaatgaaggattggaaactagagcc

SEQ ID NO: 1066360 - DNA, 33 bp, Homo sapien
aattggaacaatgaagtattggaaactagagcc

SEQ ID NO: 1066361 - DNA, 33 bp, Homo sapien
attctgagtaccagacaaaactgctttcagaga

SEQ ID NO: 1066362 - DNA, 33 bp, Homo sapien
attctgagtaccagaccaaactgctttcagaga

SEQ ID NO: 1066363 - DNA, 33 bp, Homo sapien
aatctttcagaagagaataacagcaatcataga

SEQ ID NO: 1066364 - DNA, 33 bp, Homo sapien
aatctttcagaagagactaacagcaatcataga

SEQ ID NO: 1066365 - DNA, 33 bp, Homo sapien
agtggttttttcggataaaatctgtgtcgtctg

SEQ ID NO: 1066366 - DNA, 33 bp, Homo sapien
agtggttttttcggatcaaatctgtgtcgtctg

SEQ ID NO: 1066367 - DNA, 33 bp, Homo sapien
aatctattcttgctcaaatattcatgcaataac

SEQ ID NO: 1066368 - DNA, 33 bp, Homo sapien
aatctattcttgctcatatattcatgcaataac

SEQ ID NO: 1066369 - DNA, 33 bp, Homo sapien
ctttgtgagctgataacggaagcagaacagtac

SEQ ID NO: 1066370 - DNA, 33 bp, Homo sapien
ctttgtgagctgataatggaagcagaacagtac

SEQ ID NO: 1066371 - DNA, 33 bp, Homo sapien
tttgcacaacattctacgacttgaaatgtgcca

SEQ ID NO: 1066372 - DNA, 33 bp, Homo sapien
tttgcacaacattctatgacttgaaatgtgcca

SEQ ID NO: 1066373 - DNA, 33 bp, Homo sapien
ttttacatattacccaagagttgcaagtcaaaa

SEQ ID NO: 1066374 - DNA, 33 bp, Homo sapien
ttttacatattacccatgagttgcaagtcaaaa

SEQ ID NO: 1066375 - DNA, 33 bp, Homo sapien
agtgagtcaattagtaagtggtagagctggaat

SEQ ID NO: 1066376 - DNA, 33 bp, Homo sapien
agtgagtcaattagtacgtggtagagctggaat

SEQ ID NO: 1066377 - DNA, 33 bp, Homo sapien
aggtaagccaaatctcaatactttagtcagctg

SEQ ID NO: 1066378 - DNA, 33 bp, Homo sapien
aggtaagccaaatctctatactttagtcagctg

SEQ ID NO: 1066379 - DNA, 33 bp, Homo sapien
ccagaattaggaaaacagatgacacacaaagtg

SEQ ID NO: 1066380 - DNA, 33 bp, Homo sapien
ccagaattaggaaaactgatgacacacaaagtg

SEQ ID NO: 1066381 - DNA, 33 bp, Homo sapien
ttggtgtaaaaaaagaacgagacttgtggcacc

SEQ ID NO: 1066382 - DNA, 33 bp, Homo sapien
ttggtgtaaaaaaagagcgagacttgtggcacc

SEQ ID NO: 1066383 - DNA, 33 bp, Homo sapien
tgtacaggaatggtagcaattttgcacattgat

SEQ ID NO: 1066384 - DNA, 33 bp, Homo sapien
tgtacaggaatggtagtaattttgcacattgat

SEQ ID NO: 1066385 - DNA, 33 bp, Homo sapien
tcaaaaaatgtttaaacacttaagctcaaggtg

SEQ ID NO: 1066386 - DNA, 33 bp, Homo sapien
tcaaaaaatgtttaaatacttaagctcaaggtg

SEQ ID NO: 1066387 - DNA, 33 bp, Homo sapien
gggatattctactttcccacacatatcagagtt

SEQ ID NO: 1066388 - DNA, 33 bp, Homo sapien
gggatattctactttctcacacatatcagagtt

SEQ ID NO: 1066389 - DNA, 33 bp, Homo sapien
aaaacagaaatatcataaagggctgctcataga

SEQ ID NO: 1066390 - DNA, 33 bp, Homo sapien
aaaacagaaatatcatcaagggctgctcataga

SEQ ID NO: 1066391 - DNA, 33 bp, Homo sapien
attcaatagttttaaacgcagcccagtgagcgg

SEQ ID NO: 1066392 - DNA, 33 bp, Homo sapien
attcaatagttttaaatgcagcccagtgagcgg

SEQ ID NO: 1066393 - DNA, 33 bp, Homo sapien
agagagtcttcgttaacagttaggctgtcataa

SEQ ID NO: 1066394 - DNA, 33 bp, Homo sapien
agagagtcttcgttaagagttaggctgtcataa

SEQ ID NO: 1066395 - DNA, 33 bp, Homo sapien
cgtatggagaccaaatcaggagactgttgtaaa

SEQ ID NO: 1066396 - DNA, 33 bp, Homo sapien
cgtatggagaccaaattaggagactgttgtaaa

SEQ ID NO: 1066397 - DNA, 33 bp, Homo sapien
tctaacacttggaaataaggctagtgtgtagag

SEQ ID NO: 1066398 - DNA, 33 bp, Homo sapien
tctaacacttggaaattaggctagtgtgtagag

SEQ ID NO: 1066399 - DNA, 33 bp, Homo sapien
ctaaagagattgttgaactctgcttactgatgt

SEQ ID NO: 1066400 - DNA, 33 bp, Homo sapien
ctaaagagattgttgagctctgcttactgatgt

SEQ ID NO: 1066401 - DNA, 33 bp, Homo sapien
agaaatgccctaccaaatacttactaaacactt

SEQ ID NO: 1066402 - DNA, 33 bp, Homo sapien
agaaatgccctaccaagtacttactaaacactt

SEQ ID NO: 1066403 - DNA, 33 bp, Homo sapien
gcctgctatggagttacgatgacttatgaaggc

SEQ ID NO: 1066404 - DNA, 33 bp, Homo sapien
gcctgctatggagttatgatgacttatgaaggc

SEQ ID NO: 1066405 - DNA, 33 bp, Homo sapien
cctttcctatagagtgccaataaaaacaaacat

SEQ ID NO: 1066406 - DNA, 33 bp, Homo sapien
cctttcctatagagtgtcaataaaaacaaacat

SEQ ID NO: 1066407 - DNA, 33 bp, Homo sapien
accttcatgtacaaagaaattgcttcccttatt

SEQ ID NO: 1066408 - DNA, 33 bp, Homo sapien
accttcatgtacaaaggaattgcttcccttatt

SEQ ID NO: 1066409 - DNA, 33 bp, Homo sapien
agtatatgattcattaaaaaatctgaatgaata

SEQ ID NO: 1066410 - DNA, 33 bp, Homo sapien
agtatatgattcattacaaaatctgaatgaata

SEQ ID NO: 1066411 - DNA, 33 bp, Homo sapien
tgtagtttggcatctcgcatctacttttaaccc

SEQ ID NO: 1066412 - DNA, 33 bp, Homo sapien
tgtagtttggcatctctcatctacttttaaccc

SEQ ID NO: 1066413 - DNA, 33 bp, Homo sapien
tagaatgtacacatgaagtcatctattattaaa

SEQ ID NO: 1066414 - DNA, 33 bp, Homo sapien
tagaatgtacacatgaggtcatctattattaaa

SEQ ID NO: 1066415 - DNA, 33 bp, Homo sapien
agttaccaaagtggtacggagtgactgagagga

SEQ ID NO: 1066416 - DNA, 33 bp, Homo sapien
agttaccaaagtggtatggagtgactgagagga

SEQ ID NO: 1066417 - DNA, 33 bp, Homo sapien
agttgcacaggaatccgatccagaggacgtaga

SEQ ID NO: 1066418 - DNA, 33 bp, Homo sapien
agttgcacaggaatcctatccagaggacgtaga

SEQ ID NO: 1066419 - DNA, 33 bp, Homo sapien
ggatctgtatcacttccaatctgaattgtagat

SEQ ID NO: 1066420 - DNA, 33 bp, Homo sapien
ggatctgtatcacttctaatctgaattgtagat

SEQ ID NO: 1066421 - DNA, 33 bp, Homo sapien
gctgtaccaactttaacgcccacctgcagtgga

SEQ ID NO: 1066422 - DNA, 33 bp, Homo sapien
gctgtaccaactttaatgcccacctgcagtgga

SEQ ID NO: 1066423 - DNA, 33 bp, Homo sapien
acaggaaggaaagggcacagtgtacagatactt

SEQ ID NO: 1066424 - DNA, 33 bp, Homo sapien
acaggaaggaaagggcgcagtgtacagatactt

SEQ ID NO: 1066425 - DNA, 33 bp, Homo sapien
taagaatctagaattacgtggttggttctcaaa

SEQ ID NO: 1066426 - DNA, 33 bp, Homo sapien
taagaatctagaattatgtggttggttctcaaa

SEQ ID NO: 1066427 - DNA, 33 bp, Homo sapien
aaggaacaagtggttaaaggcaattagaagtga

SEQ ID NO: 1066428 - DNA, 33 bp, Homo sapien
aaggaacaagtggttagaggcaattagaagtga

SEQ ID NO: 1066429 - DNA, 33 bp, Homo sapien
tttgtacagccatatacaagcctcttgcatata

SEQ ID NO: 1066430 - DNA, 33 bp, Homo sapien
tttgtacagccatatataagcctcttgcatata

SEQ ID NO: 1066431 - DNA, 33 bp, Homo sapien
cccagacagttatgaaagattctgaatgggagc

SEQ ID NO: 1066432 - DNA, 33 bp, Homo sapien
cccagacagttatgaaggattctgaatgggagc

SEQ ID NO: 1066433 - DNA, 33 bp, Homo sapien
tcattgacaacctcaacgcagacacaatgggaa

SEQ ID NO: 1066434 - DNA, 33 bp, Homo sapien
tcattgacaacctcaatgcagacacaatgggaa

SEQ ID NO: 1066435 - DNA, 33 bp, Homo sapien
ggcctggaaaacaaagaattgaagtagccttgc

SEQ ID NO: 1066436 - DNA, 33 bp, Homo sapien
ggcctggaaaacaaaggattgaagtagccttgc

SEQ ID NO: 1066437 - DNA, 33 bp, Homo sapien
aagcagttaatgcatacaataaagagacagttt

SEQ ID NO: 1066438 - DNA, 33 bp, Homo sapien
aagcagttaatgcatagaataaagagacagttt

SEQ ID NO: 1066439 - DNA, 33 bp, Homo sapien
ggaggaaaactataaccaaggatgcaaacacag

SEQ ID NO: 1066440 - DNA, 33 bp, Homo sapien
ggaggaaaactataactaaggatgcaaacacag

SEQ ID NO: 1066441 - DNA, 33 bp, Homo sapien
gttgacattaggattcactcttgctgttgtaca

SEQ ID NO: 1066442 - DNA, 33 bp, Homo sapien
gttgacattaggattcgctcttgctgttgtaca

SEQ ID NO: 1066443 - DNA, 33 bp, Homo sapien
actcattatccagaggacaacatgaagatgttc

SEQ ID NO: 1066444 - DNA, 33 bp, Homo sapien
actcattatccagagggcaacatgaagatgttc

SEQ ID NO: 1066445 - DNA, 33 bp, Homo sapien
agtctaattccatgaaaagcaaacattagtagt

SEQ ID NO: 1066446 - DNA, 33 bp, Homo sapien
agtctaattccatgaagagcaaacattagtagt

SEQ ID NO: 1066447 - DNA, 33 bp, Homo sapien
agataatatatgtaaagttcctggcatccagca

SEQ ID NO: 1066448 - DNA, 33 bp, Homo sapien
agataatatatgtaaatttcctggcatccagca

SEQ ID NO: 1066449 - DNA, 33 bp, Homo sapien
aactatttccagaacacagtggtgttagcatca

SEQ ID NO: 1066450 - DNA, 33 bp, Homo sapien
aactatttccagaacatagtggtgttagcatca

SEQ ID NO: 1066451 - DNA, 33 bp, Homo sapien
tagtcaaaaaacatgacgtatcctaagttgctt

SEQ ID NO: 1066452 - DNA, 33 bp, Homo sapien
tagtcaaaaaacatgatgtatcctaagttgctt

SEQ ID NO: 1066453 - DNA, 33 bp, Homo sapien
tataacaaggcttgaaggatggtgtagaagaga

SEQ ID NO: 1066454 - DNA, 33 bp, Homo sapien
tataacaaggcttgaatgatggtgtagaagaga

SEQ ID NO: 1066455 - DNA, 33 bp, Homo sapien
ctacacacaaaacttgcagacctatacttcaat

SEQ ID NO: 1066456 - DNA, 33 bp, Homo sapien
ctacacacaaaacttggagacctatacttcaat

SEQ ID NO: 1066457 - DNA, 33 bp, Homo sapien
cctaccaagaaggtaacaagtgtgagcctttag

SEQ ID NO: 1066458 - DNA, 33 bp, Homo sapien
cctaccaagaaggtaataagtgtgagcctttag

SEQ ID NO: 1066459 - DNA, 33 bp, Homo sapien
cactcaatgagcattcaattttcttattagaag

SEQ ID NO: 1066460 - DNA, 33 bp, Homo sapien
cactcaatgagcattcgattttcttattagaag

SEQ ID NO: 1066461 - DNA, 33 bp, Homo sapien
taaagttgcaagctacaaaattaatatacaaaa

SEQ ID NO: 1066462 - DNA, 33 bp, Homo sapien
taaagttgcaagctacgaaattaatatacaaaa

SEQ ID NO: 1066463 - DNA, 33 bp, Homo sapien
tcaaagaacaggaatcagagaatgtgcaactgt

SEQ ID NO: 1066464 - DNA, 33 bp, Homo sapien
tcaaagaacaggaatcggagaatgtgcaactgt

SEQ ID NO: 1066465 - DNA, 33 bp, Homo sapien
aaaaatatgtaaggacaatgtaccactgtcata

SEQ ID NO: 1066466 - DNA, 33 bp, Homo sapien
aaaaatatgtaaggactatgtaccactgtcata

SEQ ID NO: 1066467 - DNA, 33 bp, Homo sapien; identical to SEQ ID NO: 1066465

SEQ ID NO: 1066468 - DNA, 33 bp, Homo sapien; identical to SEQ ID NO: 1066466

SEQ ID NO: 1066469 - DNA, 33 bp, Homo sapien
ttaaaatccaaacctgccactgggccatagagg

SEQ ID NO: 1066470 - DNA, 33 bp, Homo sapien
ttaaaatccaaacctgtcactgggccatagagg

SEQ ID NO: 1066471 - DNA, 33 bp, Homo sapien
tataattggtatgaagactactaacattacata

SEQ ID NO: 1066472 - DNA, 33 bp, Homo sapien
tataattggtatgaaggctactaacattacata

SEQ ID NO: 1066473 - DNA, 33 bp, Homo sapien
ttcaaggtggagatcacaataacttttgtaggt

SEQ ID NO: 1066474 - DNA, 33 bp, Homo sapien
ttcaaggtggagatcataataacttttgtaggt

SEQ ID NO: 1066475 - DNA, 33 bp, Homo sapien
tcatgatcacgttaaaatgtgtaacttcattat

SEQ ID NO: 1066476 - DNA, 33 bp, Homo sapien
tcatgatcacgttaaactgtgtaacttcattat

SEQ ID NO: 1066477 - DNA, 33 bp, Homo sapien
gttgcggagtacttcccgaacacaagactgtgc

SEQ ID NO: 1066478 - DNA, 33 bp, Homo sapien
gttgcggagtacttccggaacacaagactgtgc

SEQ ID NO: 1066479 - DNA, 33 bp, Homo sapien
agtatacaggaggataagagtaggctatatgca

SEQ ID NO: 1066480 - DNA, 33 bp, Homo sapien
agtatacaggaggatatgagtaggctatatgca

SEQ ID NO: 1066481 - DNA, 33 bp, Homo sapien
ctgagtcctgaggtaaatcagctcactgggtct

SEQ ID NO: 1066482 - DNA, 33 bp, Homo sapien
ctgagtcctgaggtaagtcagctcactgggtct

SEQ ID NO: 1066483 - DNA, 33 bp, Homo sapien
ggaggtagttggtatcacttctgttttactcat

SEQ ID NO: 1066484 - DNA, 33 bp, Homo sapien
ggaggtagttggtatcgcttctgttttactcat

SEQ ID NO: 1066485 - DNA, 33 bp, Homo sapien
ttttgcacaggtacccactgaaagaacaggaat

SEQ ID NO: 1066486 - DNA, 33 bp, Homo sapien
ttttgcacaggtacccgctgaaagaacaggaat

SEQ ID NO: 1066487 - DNA, 33 bp, Homo sapien
gaagagggagaaataaagaagaggaaccactga

SEQ ID NO: 1066488 - DNA, 33 bp, Homo sapien
gaagagggagaaataaggaagaggaaccactga

SEQ ID NO: 1066489 - DNA, 33 bp, Homo sapien
gagagatgaatccaaacggagaggtcaaaggta

SEQ ID NO: 1066490 - DNA, 33 bp, Homo sapien
gagagatgaatccaaatggagaggtcaaaggta

SEQ ID NO: 1066491 - DNA, 33 bp, Homo sapien
atacacaaactggtcaaaaccaaccttcaggcc

SEQ ID NO: 1066492 - DNA, 33 bp, Homo sapien
atacacaaactggtcacaaccaaccttcaggcc

SEQ ID NO: 1066493 - DNA, 33 bp, Homo sapien
ttcttttccattcttcaatattacaaggcatag

SEQ ID NO: 1066494 - DNA, 33 bp, Homo sapien
ttcttttccattcttcgatattacaaggcatag

SEQ ID NO: 1066495 - DNA, 33 bp, Homo sapien
gctttgtccataccgaatacaagtgggccccct

SEQ ID NO: 1066496 - DNA, 33 bp, Homo sapien
gctttgtccataccgagtacaagtgggccccct

SEQ ID NO: 1066497 - DNA, 33 bp, Homo sapien
ttcctacagacttcgaagatcccttctggtcct

SEQ ID NO: 1066498 - DNA, 33 bp, Homo sapien
ttcctacagacttcgaggatcccttctggtcct

SEQ ID NO: 1066499 - DNA, 33 bp, Homo sapien
ggaaacaccaggagtgaaaatttcagaggcctg

SEQ ID NO: 1066500 - DNA, 33 bp, Homo sapien
ggaaacaccaggagtggaaatttcagaggcctg

SEQ ID NO: 1066501 - DNA, 33 bp, Homo sapien
tcaactgcctagtggacgaacaggagcaaaagt

SEQ ID NO: 1066502 - DNA, 33 bp, Homo sapien
tcaactgcctagtggatgaacaggagcaaaagt

SEQ ID NO: 1066503 - DNA, 33 bp, Homo sapien
caagccactgggataccacactgcttctcttgg

SEQ ID NO: 1066504 - DNA, 33 bp, Homo sapien
caagccactgggatactacactgcttctcttgg

SEQ ID NO: 1066505 - DNA, 33 bp, Homo sapien
gaatggcattctcccccacttaccaagtgaacc

SEQ ID NO: 1066506 - DNA, 33 bp, Homo sapien
gaatggcattctccccgacttaccaagtgaacc

SEQ ID NO: 1066507 - DNA, 33 bp, Homo sapien
tgcagattctttgaataactttatgaagagagg

SEQ ID NO: 1066508 - DNA, 33 bp, Homo sapien
tgcagattctttgaatgactttatgaagagagg

SEQ ID NO: 1066509 - DNA, 33 bp, Homo sapien
aaaaatttggtcctaacttacagagctgaattt

SEQ ID NO: 1066510 - DNA, 33 bp, Homo sapien
aaaaatttggtcctaatttacagagctgaattt

SEQ ID NO: 1066511 - DNA, 33 bp, Homo sapien
ttaactgggtgcttcccatgaacaagacattga

SEQ ID NO: 1066512 - DNA, 33 bp, Homo sapien
ttaactgggtgcttccgatgaacaagacattga

SEQ ID NO: 1066513 - DNA, 33 bp, Homo sapien
aggaccttctcactgactaaaaagacaacaaca

SEQ ID NO: 1066514 - DNA, 33 bp, Homo sapien
aggaccttctcactgattaaaaagacaacaaca

SEQ ID NO: 1066515 - DNA, 33 bp, Homo sapien
tataaatgttcataggaaagtcaggaaggttga

SEQ ID NO: 1066516 - DNA, 33 bp, Homo sapien
tataaatgttcatagggaagtcaggaaggttga

SEQ ID NO: 1066517 - DNA, 33 bp, Homo sapien
gctgagttcactgatacaggctgggcttcctgt

SEQ ID NO: 1066518 - DNA, 33 bp, Homo sapien
gctgagttcactgatagaggctgggcttcctgt

SEQ ID NO: 1066519 - DNA, 33 bp, Homo sapien
cacttgtaaatgacaacaggtctgttttgctat

SEQ ID NO: 1066520 - DNA, 33 bp, Homo sapien
cacttgtaaatgacaagaggtctgttttgctat

SEQ ID NO: 1066521 - DNA, 33 bp, Homo sapien
aataatgtcaatattacggaatgaattatgtgt

SEQ ID NO: 1066522 - DNA, 33 bp, Homo sapien
aataatgtcaatattatggaatgaattatgtgt

SEQ ID NO: 1066523 - DNA, 33 bp, Homo sapien
ttaagagtagacaatgcatggaggtagagacga

SEQ ID NO: 1066524 - DNA, 33 bp, Homo sapien
ttaagagtagacaatggatggaggtagagacga

SEQ ID NO: 1066525 - DNA, 33 bp, Homo sapien
ttcttggcatcattgaacctttgaaaagaaggt

SEQ ID NO: 1066526 - DNA, 33 bp, Homo sapien
ttcttggcatcattgaccctttgaaaagaaggt

SEQ ID NO: 1066527 - DNA, 33 bp, Homo sapien
ggatttatttagcagacctctgaaaattggctg

SEQ ID NO: 1066528 - DNA, 33 bp, Homo sapien
ggatttatttagcagatctctgaaaattggctg

SEQ ID NO: 1066529 - DNA, 33 bp, Homo sapien
atgtgaaatgcataaacagaatggctccatagc

SEQ ID NO: 1066530 - DNA, 33 bp, Homo sapien
atgtgaaatgcataaagagaatggctccatagc

SEQ ID NO: 1066531 - DNA, 33 bp, Homo sapien
tagtcaaagtctgagcaagcagaaaagaacctg

SEQ ID NO: 1066532 - DNA, 33 bp, Homo sapien
tagtcaaagtctgagcgagcagaaaagaacctg

SEQ ID NO: 1066533 - DNA, 33 bp, Homo sapien
cctatattctcctgggaaatcttgagaagctgg

SEQ ID NO: 1066534 - DNA, 33 bp, Homo sapien
cctatattctcctgggtaatcttgagaagctgg

SEQ ID NO: 1066535 - DNA, 33 bp, Homo sapien
tttttcttctcatagccgcaaaatgtaatttca

SEQ ID NO: 1066536 - DNA, 33 bp, Homo sapien
tttttcttctcatagctgcaaaatgtaatttca

SEQ ID NO: 1066537 - DNA, 33 bp, Homo sapien
gcaccctgtgtttacaatatcttaagcctctaa

SEQ ID NO: 1066538 - DNA, 33 bp, Homo sapien
gcaccctgtgtttacagtatcttaagcctctaa

SEQ ID NO: 1066539 - DNA, 33 bp, Homo sapien
aatcagtttaacctcacgttgcctaggggagag

SEQ ID NO: 1066540 - DNA, 33 bp, Homo sapien
aatcagtttaacctcatgttgcctaggggagag

SEQ ID NO: 1066541 - DNA, 33 bp, Homo sapien
tatatgccagcaactacgctaaattgatgattt

SEQ ID NO: 1066542 - DNA, 33 bp, Homo sapien
tatatgccagcaactatgctaaattgatgattt

SEQ ID NO: 1066543 - DNA, 33 bp, Homo sapien
gaaggtttctttagacgccagtcctggtttcat

SEQ ID NO: 1066544 - DNA, 33 bp, Homo sapien
gaaggtttctttagactccagtcctggtttcat

SEQ ID NO: 1066545 - DNA, 33 bp, Homo sapien
gaaggtggcacagtatcagaaaggtcacatata

SEQ ID NO: 1066546 - DNA, 33 bp, Homo sapien
gaaggtggcacagtatgagaaaggtcacatata

SEQ ID NO: 1066547 - DNA, 33 bp, Homo sapien
agaaaccagtatcctaaaacagatgcagagtga

SEQ ID NO: 1066548 - DNA, 33 bp, Homo sapien
agaaaccagtatcctagaacagatgcagagtga

SEQ ID NO: 1066549 - DNA, 33 bp, Homo sapien
cactggtaccacctaccgggcttcataggttct

SEQ ID NO: 1066550 - DNA, 33 bp, Homo sapien
cactggtaccacctactgggcttcataggttct

SEQ ID NO: 1066551 - DNA, 33 bp, Homo sapien
aaccttcaatataagagaatttgctgagtctaa

SEQ ID NO: 1066552 - DNA, 33 bp, Homo sapien
aaccttcaatataagataatttgctgagtctaa

SEQ ID NO: 1066553 - DNA, 33 bp, Homo sapien
gggactggaaatgtaacagtatgttttcctagt

SEQ ID NO: 1066554 - DNA, 33 bp, Homo sapien
gggactggaaatgtaatagtatgttttcctagt

SEQ ID NO: 1066555 - DNA, 33 bp, Homo sapien
atttaacttccaacaactggctacatatcatta

SEQ ID NO: 1066556 - DNA, 33 bp, Homo sapien
atttaacttccaacaattggctacatatcatta

SEQ ID NO: 1066557 - DNA, 33 bp, Homo sapien
aagtgaaagtctttcaatcataacaacctaacc

SEQ ID NO: 1066558 - DNA, 33 bp, Homo sapien
aagtgaaagtctttcagtcataacaacctaacc

SEQ ID NO: 1066559 - DNA, 33 bp, Homo sapien
ttatactcagtaaaagcattgcctgatcaaatg

SEQ ID NO: 1066560 - DNA, 33 bp, Homo sapien
ttatactcagtaaaaggattgcctgatcaaatg

SEQ ID NO: 1066561 - DNA, 33 bp, Homo sapien
acagattttaaaccaacgatagtaaacatggac

SEQ ID NO: 1066562 - DNA, 33 bp, Homo sapien
acagattttaaaccaatgatagtaaacatggac

SEQ ID NO: 1066563 - DNA, 33 bp, Homo sapien
aaaccatgatctttaacaattacattttaaaat

SEQ ID NO: 1066564 - DNA, 33 bp, Homo sapien
aaaccatgatctttaagaattacattttaaaat

SEQ ID NO: 1066565 - DNA, 33 bp, Homo sapien
atcttaagataaagcaagagttttagtcttcca

SEQ ID NO: 1066566 - DNA, 33 bp, Homo sapien
atcttaagataaagcatgagttttagtcttcca

SEQ ID NO: 1066567 - DNA, 33 bp, Homo sapien
ttccttgctatttgtacggtatatcccaacaat

SEQ ID NO: 1066568 - DNA, 33 bp, Homo sapien
ttccttgctatttgtatggtatatcccaacaat

SEQ ID NO: 1066569 - DNA, 33 bp, Homo sapien
ttctacttattacatacccttagatcctgtgtg

SEQ ID NO: 1066570 - DNA, 33 bp, Homo sapien
ttctacttattacatatccttagatcctgtgtg

SEQ ID NO: 1066571 - DNA, 33 bp, Homo sapien
ataaataaacatagccagagaacaaatagtact

SEQ ID NO: 1066572 - DNA, 33 bp, Homo sapien
ataaataaacatagcccgagaacaaatagtact

SEQ ID NO: 1066573 - DNA, 33 bp, Homo sapien
gtattaattggtcaccaaacttggcaggcaagg

SEQ ID NO: 1066574 - DNA, 33 bp, Homo sapien
gtattaattggtcaccgaacttggcaggcaagg

SEQ ID NO: 1066575 - DNA, 33 bp, Homo sapien
aaacaccaaagtaaaaacacacatctgtggctg

SEQ ID NO: 1066576 - DNA, 33 bp, Homo sapien
aaacaccaaagtaaaaccacacatctgtggctg

SEQ ID NO: 1066577 - DNA, 33 bp, Homo sapien
agggctgagttccaaaatctatcttttaaataa

SEQ ID NO: 1066578 - DNA, 33 bp, Homo sapien
agggctgagttccaaagtctatcttttaaataa

SEQ ID NO: 1066579 - DNA, 33 bp, Homo sapien
ggatctagcatccaataaggcatcttgttcaag

SEQ ID NO: 1066580 - DNA, 33 bp, Homo sapien
ggatctagcatccaatgaggcatcttgttcaag

SEQ ID NO: 1066581 - DNA, 33 bp, Homo sapien
attcacaatttacttacgcatttcagatattct

SEQ ID NO: 1066582 - DNA, 33 bp, Homo sapien
attcacaatttacttatgcatttcagatattct

SEQ ID NO: 1066583 - DNA, 33 bp, Homo sapien
gccactcctttatgtacgtctcggcaaagaccc

SEQ ID NO: 1066584 - DNA, 33 bp, Homo sapien
gccactcctttatgtatgtctcggcaaagaccc

SEQ ID NO: 1066585 - DNA, 33 bp, Homo sapien
tatcctggtatgcacactgggagactaatcaag

SEQ ID NO: 1066586 - DNA, 33 bp, Homo sapien
tatcctggtatgcacattgggagactaatcaag

SEQ ID NO: 1066587 - DNA, 33 bp, Homo sapien
catggtttgaaatttacattatatgtagcaact

SEQ ID NO: 1066588 - DNA, 33 bp, Homo sapien
catggtttgaaatttatattatatgtagcaact

SEQ ID NO: 1066589 - DNA, 33 bp, Homo sapien
gtaagattgcaatccacgctttttactgctttc

SEQ ID NO: 1066590 - DNA, 33 bp, Homo sapien
gtaagattgcaatccatgctttttactgctttc

SEQ ID NO: 1066591 - DNA, 33 bp, Homo sapien
ggcactgccctgataacgacaaaaatgctcctg

SEQ ID NO: 1066592 - DNA, 33 bp, Homo sapien
ggcactgccctgataatgacaaaaatgctcctg

SEQ ID NO: 1066593 - DNA, 33 bp, Homo sapien
ttaccataagcccaaaagactgccagcaaagct

SEQ ID NO: 1066594 - DNA, 33 bp, Homo sapien
ttaccataagcccaaatgactgccagcaaagct

SEQ ID NO: 1066595 - DNA, 33 bp, Homo sapien
aaattcataatcttaaccactatatacaggaaa

SEQ ID NO: 1066596 - DNA, 33 bp, Homo sapien
aaattcataatcttaatcactatatacaggaaa

SEQ ID NO: 1066597 - DNA, 33 bp, Homo sapien
gtcccttctaacagacagagggaaactgggcct

SEQ ID NO: 1066598 - DNA, 33 bp, Homo sapien
gtcccttctaacagacggagggaaactgggcct

SEQ ID NO: 1066599 - DNA, 33 bp, Homo sapien
gttagtaaagacttcacgcttacacagattctt

SEQ ID NO: 1066600 - DNA, 33 bp, Homo sapien
gttagtaaagacttcatgcttacacagattctt

SEQ ID NO: 1066601 - DNA, 33 bp, Homo sapien
tattggatcacaactacaccttagccttcaccc

SEQ ID NO: 1066602 - DNA, 33 bp, Homo sapien
tattggatcacaactataccttagccttcaccc

SEQ ID NO: 1066603 - DNA, 33 bp, Homo sapien
gttagagatctttcggcatcagtatatagaata

SEQ ID NO: 1066604 - DNA, 33 bp, Homo sapien
gttagagatctttcggtatcagtatatagaata

SEQ ID NO: 1066605 - DNA, 33 bp, Homo sapien
cttgggtcatgggcaaatatgtcctatggcctg

SEQ ID NO: 1066606 - DNA, 33 bp, Homo sapien
cttgggtcatgggcaagtatgtcctatggcctg

SEQ ID NO: 1066607 - DNA, 33 bp, Homo sapien
tatactctctcacaacactttatgcttatttta

SEQ ID NO: 1066608 - DNA, 33 bp, Homo sapien
tatactctctcacaactctttatgcttatttta

SEQ ID NO: 1066609 - DNA, 33 bp, Homo sapien
tgtgtagccctaggcacgtcactttgcccatct

SEQ ID NO: 1066610 - DNA, 33 bp, Homo sapien
tgtgtagccctaggcaggtcactttgcccatct

SEQ ID NO: 1066611 - DNA, 33 bp, Homo sapien
cagtgtggcgattcctcaaataactaaaaacgg

SEQ ID NO: 1066612 - DNA, 33 bp, Homo sapien
cagtgtggcgattcctgaaataactaaaaacgg

SEQ ID NO: 1066613 - DNA, 33 bp, Homo sapien
aatcataaacttgacaaagaatgttaacaccaa

SEQ ID NO: 1066614 - DNA, 33 bp, Homo sapien
aatcataaacttgacagagaatgttaacaccaa

SEQ ID NO: 1066615 - DNA, 33 bp, Homo sapien
accctttgtccaatcaaatttctgcatggctgt

SEQ ID NO: 1066616 - DNA, 33 bp, Homo sapien
accctttgtccaatcacatttctgcatggctgt

SEQ ID NO: 1066617 - DNA, 33 bp, Homo sapien
ctgtctattattcattaaacctaagtataaaaa

SEQ ID NO: 1066618 - DNA, 33 bp, Homo sapien
ctgtctattattcattgaacctaagtataaaaa

SEQ ID NO: 1066619 - DNA, 33 bp, Homo sapien
attgaacgttgggatacgaaagtaattaaagga

SEQ ID NO: 1066620 - DNA, 33 bp, Homo sapien
attgaacgttgggatatgaaagtaattaaagga

SEQ ID NO: 1066621 - DNA, 33 bp, Homo sapien
gagaaagcccctctaactgatttggaagaacaa

SEQ ID NO: 1066622 - DNA, 33 bp, Homo sapien
gagaaagcccctctaagtgatttggaagaacaa

SEQ ID NO: 1066623 - DNA, 33 bp, Homo sapien
tgccagatagccatccgcagtttctgtctctgt

SEQ ID NO: 1066624 - DNA, 33 bp, Homo sapien
tgccagatagccatcctcagtttctgtctctgt

SEQ ID NO: 1066625 - DNA, 33 bp, Homo sapien
aactggaaagatagaccggaaactgtagatgtt

SEQ ID NO: 1066626 - DNA, 33 bp, Homo sapien
aactggaaagatagactggaaactgtagatgtt

SEQ ID NO: 1066627 - DNA, 33 bp, Homo sapien
ctaattaaaatattggccatcattgtctaattg

SEQ ID NO: 1066628 - DNA, 33 bp, Homo sapien
ctaattaaaatattggtcatcattgtctaattg

SEQ ID NO: 1066629 - DNA, 33 bp, Homo sapien
cacagtgatccacgcaaacataaaacaataatg

SEQ ID NO: 1066630 - DNA, 33 bp, Homo sapien
cacagtgatccacgcagacataaaacaataatg

SEQ ID NO: 1066631 - DNA, 33 bp, Homo sapien
gggattctagagcctacggcttcacaaactttt

SEQ ID NO: 1066632 - DNA, 33 bp, Homo sapien
gggattctagagcctagggcttcacaaactttt

SEQ ID NO: 1066633 - DNA, 33 bp, Homo sapien
tttttctgtaaagaaccggattgtaaatatgtt

SEQ ID NO: 1066634 - DNA, 33 bp, Homo sapien
tttttctgtaaagaactggattgtaaatatgtt

SEQ ID NO: 1066635 - DNA, 33 bp, Homo sapien
attggaattgagatgaatatcaggagtgagaga

SEQ ID NO: 1066636 - DNA, 33 bp, Homo sapien
attggaattgagatgagtatcaggagtgagaga

SEQ ID NO: 1066637 - DNA, 33 bp, Homo sapien
ggcaatttccaaatgccattcattgtatagatg

SEQ ID NO: 1066638 - DNA, 33 bp, Homo sapien
ggcaatttccaaatgctattcattgtatagatg

SEQ ID NO: 1066639 - DNA, 33 bp, Homo sapien
attcaaatgtccatcaactttttaatggataaa

SEQ ID NO: 1066640 - DNA, 33 bp, Homo sapien
attcaaatgtccatcagctttttaatggataaa

SEQ ID NO: 1066641 - DNA, 33 bp, Homo sapien
aaatcaaatagatgacaagaatgatgatatttt

SEQ ID NO: 1066642 - DNA, 33 bp, Homo sapien
aaatcaaatagatgaccagaatgatgatatttt

SEQ ID NO: 1066643 - DNA, 33 bp, Homo sapien
aaggatgaaattcttacggcatctggaccaaaa

SEQ ID NO: 1066644 - DNA, 33 bp, Homo sapien
aaggatgaaattcttatggcatctggaccaaaa

SEQ ID NO: 1066645 - DNA, 33 bp, Homo sapien
tttctagtagctattacaggttcatgttcttct

SEQ ID NO: 1066646 - DNA, 33 bp, Homo sapien
tttctagtagctattataggttcatgttcttct

SEQ ID NO: 1066647 - DNA, 33 bp, Homo sapien
tgggctaaatctaaaagaagtcaggcaagattt

SEQ ID NO: 1066648 - DNA, 33 bp, Homo sapien
tgggctaaatctaaaataagtcaggcaagattt

SEQ ID NO: 1066649 - DNA, 33 bp, Homo sapien
gcatgagttatcgaaaataatcaaattcttaga

SEQ ID NO: 1066650 - DNA, 33 bp, Homo sapien
gcatgagttatcgaaagtaatcaaattcttaga

SEQ ID NO: 1066651 - DNA, 33 bp, Homo sapien
ttatatttcctagtcaatcaaaattctctgagc

SEQ ID NO: 1066652 - DNA, 33 bp, Homo sapien
ttatatttcctagtcagtcaaaattctctgagc

SEQ ID NO: 1066653 - DNA, 33 bp, Homo sapien
tcaacacaatttacagaaaggttcaacagaaaa

SEQ ID NO: 1066654 - DNA, 33 bp, Homo sapien
tcaacacaatttacaggaaggttcaacagaaaa

SEQ ID NO: 1066655 - DNA, 33 bp, Homo sapien
cactaagcaaaataaaattgaagtacctacatg

SEQ ID NO: 1066656 - DNA, 33 bp, Homo sapien
cactaagcaaaataaacttgaagtacctacatg

SEQ ID NO: 1066657 - DNA, 33 bp, Homo sapien
tagtagtactggacttgaagattctacggattt

SEQ ID NO: 1066658 - DNA, 33 bp, Homo sapien
tagtagtactggactttaagattctacggattt

SEQ ID NO: 1066659 - DNA, 33 bp, Homo sapien
aatatgataccagacaataacttggatatacat

SEQ ID NO: 1066660 - DNA, 33 bp, Homo sapien
aatatgataccagacagtaacttggatatacat

SEQ ID NO: 1066661 - DNA, 33 bp, Homo sapien
gtaatgcctttcttgaagtagaaaataagtcat

SEQ ID NO: 1066662 - DNA, 33 bp, Homo sapien
gtaatgcctttcttgatgtagaaaataagtcat

SEQ ID NO: 1066663 - DNA, 33 bp, Homo sapien
atgaaaactcagaatacagatcactgtgagcca

SEQ ID NO: 1066664 - DNA, 33 bp, Homo sapien
atgaaaactcagaatatagatcactgtgagcca

SEQ ID NO: 1066665 - DNA, 33 bp, Homo sapien
tgctcatggcatatgccgaacttctaaaacagt

SEQ ID NO: 1066666 - DNA, 33 bp, Homo sapien
tgctcatggcatatgctgaacttctaaaacagt

SEQ ID NO: 1066667 - DNA, 33 bp, Homo sapien
ctattgagctatcccaagtttgggtctattttt

SEQ ID NO: 1066668 - DNA, 33 bp, Homo sapien
ctattgagctatcccatgtttgggtctattttt

SEQ ID NO: 1066669 - DNA, 33 bp, Homo sapien
agtggcaagccataaaaaatgacactctctaat

SEQ ID NO: 1066670 - DNA, 33 bp, Homo sapien
agtggcaagccataaataatgacactctctaat

SEQ ID NO: 1066671 - DNA, 33 bp, Homo sapien
atgtgcagtttgccctcaaatggcacatgcatg

SEQ ID NO: 1066672 - DNA, 33 bp, Homo sapien
atgtgcagtttgcccttaaatggcacatgcatg

SEQ ID NO: 1066673 - DNA, 33 bp, Homo sapien
tctcaaaagggacaacagtgggatgatctgact

SEQ ID NO: 1066674 - DNA, 33 bp, Homo sapien
tctcaaaagggacaacggtgggatgatctgact

SEQ ID NO: 1066675 - DNA, 33 bp, Homo sapien
taaaaactagagttaacgttagtcagattttct

SEQ ID NO: 1066676 - DNA, 33 bp, Homo sapien
taaaaactagagttaatgttagtcagattttct

SEQ ID NO: 1066677 - DNA, 33 bp, Homo sapien
tggttgtgctgatgcaaaacattggaatctgtt

SEQ ID NO: 1066678 - DNA, 33 bp, Homo sapien
tggttgtgctgatgcagaacattggaatctgtt

SEQ ID NO: 1066679 - DNA, 33 bp, Homo sapien
caaggtgactaagaaacaggtgaaacaattaag

SEQ ID NO: 1066680 - DNA, 33 bp, Homo sapien
caaggtgactaagaaagaggtgaaacaattaag

SEQ ID NO: 1066681 - DNA, 33 bp, Homo sapien
cgtttctagtactggtcacaatggtcacatgga

SEQ ID NO: 1066682 - DNA, 33 bp, Homo sapien
cgtttctagtactggttacaatggtcacatgga

SEQ ID NO: 1066683 - DNA, 33 bp, Homo sapien
cttattatttctgtaactgcatactaacaaagt

SEQ ID NO: 1066684 - DNA, 33 bp, Homo sapien
cttattatttctgtaattgcatactaacaaagt

SEQ ID NO: 1066685 - DNA, 33 bp, Homo sapien
acattgtctatttcacagtctagcagaaaggcc

SEQ ID NO: 1066686 - DNA, 33 bp, Homo sapien
acattgtctatttcaccgtctagcagaaaggcc

SEQ ID NO: 1066687 - DNA, 33 bp, Homo sapien
ctttttctaggggaaccaatttacatcagtcag

SEQ ID NO: 1066688 - DNA, 33 bp, Homo sapien
ctttttctaggggaactaatttacatcagtcag

SEQ ID NO: 1066689 - DNA, 33 bp, Homo sapien
tgaaagcattttggtaccacgggttattctgct

SEQ ID NO: 1066690 - DNA, 33 bp, Homo sapien
tgaaagcattttggtatcacgggttattctgct

SEQ ID NO: 1066691 - DNA, 33 bp, Homo sapien
aggatgcagtaggtcaaagtttaacagctgctg

SEQ ID NO: 1066692 - DNA, 33 bp, Homo sapien
aggatgcagtaggtcagagtttaacagctgctg

SEQ ID NO: 1066693 - DNA, 33 bp, Homo sapien
ttggactggaactataccataggtgttactggg

SEQ ID NO: 1066694 - DNA, 33 bp, Homo sapien
ttggactggaactatatcataggtgttactggg

SEQ ID NO: 1066695 - DNA, 33 bp, Homo sapien
attgttctcaaattccacaaatgagagattaat

SEQ ID NO: 1066696 - DNA, 33 bp, Homo sapien
attgttctcaaattccgcaaatgagagattaat

SEQ ID NO: 1066697 - DNA, 33 bp, Homo sapien
tcctatacctaactcaaactagatgatgcaaaa

SEQ ID NO: 1066698 - DNA, 33 bp, Homo sapien
tcctatacctaactcagactagatgatgcaaaa

SEQ ID NO: 1066699 - DNA, 33 bp, Homo sapien
tagcacagaatttttcaaatagtacattctcaa

SEQ ID NO: 1066700 - DNA, 33 bp, Homo sapien
tagcacagaatttttccaatagtacattctcaa

SEQ ID NO: 1066701 - DNA, 33 bp, Homo sapien
tatgtatgttcctctccaaactggtgattctga

SEQ ID NO: 1066702 - DNA, 33 bp, Homo sapien
tatgtatgttcctctctaaactggtgattctga

SEQ ID NO: 1066703 - DNA, 33 bp, Homo sapien
cactttaaaatgtataaaagcattctgtgtatg

SEQ ID NO: 1066704 - DNA, 33 bp, Homo sapien
cactttaaaatgtatagaagcattctgtgtatg

SEQ ID NO: 1066705 - DNA, 33 bp, Homo sapien
ttgacttttttatacccggatattcttatcttt

SEQ ID NO: 1066706 - DNA, 33 bp, Homo sapien
ttgacttttttatacctggatattcttatcttt

SEQ ID NO: 1066707 - DNA, 33 bp, Homo sapien
taccaagtaagtactacaaaactcagttctttg

SEQ ID NO: 1066708 - DNA, 33 bp, Homo sapien
taccaagtaagtactataaaactcagttctttg

SEQ ID NO: 1066709 - DNA, 33 bp, Homo sapien
aaaacatgtatgcagagtagaaaaacttttaaa

SEQ ID NO: 1066710 - DNA, 33 bp, Homo sapien
aaaacatgtatgcagattagaaaaacttttaaa

SEQ ID NO: 1066711 - DNA, 33 bp, Homo sapien
ctatttgctcaagtctaactaatctttttcttt

SEQ ID NO: 1066712 - DNA, 33 bp, Homo sapien
ctatttgctcaagtctgactaatctttttcttt

SEQ ID NO: 1066713 - DNA, 33 bp, Homo sapien
agtcaaagctgtcaaaagtcctaataaaagtag

SEQ ID NO: 1066714 - DNA, 33 bp, Homo sapien
agtcaaagctgtcaaaggtcctaataaaagtag

SEQ ID NO: 1066715 - DNA, 33 bp, Homo sapien
cactacagcctgttaccggacacaagtgattct

SEQ ID NO: 1066716 - DNA, 33 bp, Homo sapien
cactacagcctgttactggacacaagtgattct

SEQ ID NO: 1066717 - DNA, 33 bp, Homo sapien
cattctgcttatagcaacatactgtggggccat

SEQ ID NO: 1066718 - DNA, 33 bp, Homo sapien
cattctgcttatagcaccatactgtggggccat

SEQ ID NO: 1066719 - DNA, 33 bp, Homo sapien
ttggaaatctcagctaaacctctaagttcatca

SEQ ID NO: 1066720 - DNA, 33 bp, Homo sapien
ttggaaatctcagctagacctctaagttcatca

SEQ ID NO: 1066721 - DNA, 33 bp, Homo sapien
ggattcacaaagagacagcagggatgtcagtgc

SEQ ID NO: 1066722 - DNA, 33 bp, Homo sapien
ggattcacaaagagacggcagggatgtcagtgc

SEQ ID NO: 1066723 - DNA, 33 bp, Homo sapien
ctcgcactagactataagtttaagagaactggg

SEQ ID NO: 1066724 - DNA, 33 bp, Homo sapien
ctcgcactagactatacgtttaagagaactggg

SEQ ID NO: 1066725 - DNA, 33 bp, Homo sapien
acaaaatattgagctaaaatttcagcttatatt

SEQ ID NO: 1066726 - DNA, 33 bp, Homo sapien
acaaaatattgagctagaatttcagcttatatt

SEQ ID NO: 1066727 - DNA, 33 bp, Homo sapien
agctagcatttttacaacatcaaacctgaagat

SEQ ID NO: 1066728 - DNA, 33 bp, Homo sapien
agctagcatttttacagcatcaaacctgaagat

SEQ ID NO: 1066729 - DNA, 33 bp, Homo sapien
gctgtccagtttactacgcaataacaacacagg

SEQ ID NO: 1066730 - DNA, 33 bp, Homo sapien
gctgtccagtttactatgcaataacaacacagg

SEQ ID NO: 1066731 - DNA, 33 bp, Homo sapien
ggattgtttctgccaaatgagtaaaattgccat

SEQ ID NO: 1066732 - DNA, 33 bp, Homo sapien
ggattgtttctgccaagtgagtaaaattgccat

SEQ ID NO: 1066733 - DNA, 33 bp, Homo sapien
ggaattagataaggctaaaaaattctgctagtc

SEQ ID NO: 1066734 - DNA, 33 bp, Homo sapien
ggaattagataaggctgaaaaattctgctagtc

SEQ ID NO: 1066735 - DNA, 33 bp, Homo sapien
actttaatacaaggtacgactgtaagagagtaa

SEQ ID NO: 1066736 - DNA, 33 bp, Homo sapien
actttaatacaaggtatgactgtaagagagtaa

SEQ ID NO: 1066737 - DNA, 33 bp, Homo sapien
ctaaaatggagtcctaaatttgggaaacaggag

SEQ ID NO: 1066738 - DNA, 33 bp, Homo sapien
ctaaaatggagtcctacatttgggaaacaggag

SEQ ID NO: 1066739 - DNA, 33 bp, Homo sapien
cataggtctaatgaaaataatctctcttttgtc

SEQ ID NO: 1066740 - DNA, 33 bp, Homo sapien
cataggtctaatgaaactaatctctcttttgtc

SEQ ID NO: 1066741 - DNA, 33 bp, Homo sapien
gaatggtgaacactgaagtatatcatagtaaat

SEQ ID NO: 1066742 - DNA, 33 bp, Homo sapien
gaatggtgaacactgaggtatatcatagtaaat

SEQ ID NO: 1066743 - DNA, 33 bp, Homo sapien
aattagtttgctctcaaaatcgatcaatatttc

SEQ ID NO: 1066744 - DNA, 33 bp, Homo sapien
aattagtttgctctcagaatcgatcaatatttc

SEQ ID NO: 1066745 - DNA, 33 bp, Homo sapien
attttcctaatgttgacctatcctgatgtggtt

SEQ ID NO: 1066746 - DNA, 33 bp, Homo sapien
attttcctaatgttgagctatcctgatgtggtt

SEQ ID NO: 1066747 - DNA, 33 bp, Homo sapien
ttatattcttaattgaaaaattgttgcagaaag

SEQ ID NO: 1066748 - DNA, 33 bp, Homo sapien
ttatattcttaattgagaaattgttgcagaaag

SEQ ID NO: 1066749 - DNA, 33 bp, Homo sapien
tacaaatagttaattcaattctaaccagtagaa

SEQ ID NO: 1066750 - DNA, 33 bp, Homo sapien
tacaaatagttaattcgattctaaccagtagaa

SEQ ID NO: 1066751 - DNA, 33 bp, Homo sapien
gtgggtattctcggtcaatgtctttgagttcat

SEQ ID NO: 1066752 - DNA, 33 bp, Homo sapien
gtgggtattctcggtcgatgtctttgagttcat

SEQ ID NO: 1066753 - DNA, 33 bp, Homo sapien
tcttacagcccttccaccttgagaatcacttct

SEQ ID NO: 1066754 - DNA, 33 bp, Homo sapien
tcttacagcccttccatcttgagaatcacttct

SEQ ID NO: 1066755 - DNA, 33 bp, Homo sapien
tggccactacaccccccgcatcatcttgattct

SEQ ID NO: 1066756 - DNA, 33 bp, Homo sapien
tggccactacaccccctgcatcatcttgattct

SEQ ID NO: 1066757 - DNA, 33 bp, Homo sapien
catgaagatggaatcacataataggaggctttt

SEQ ID NO: 1066758 - DNA, 33 bp, Homo sapien
catgaagatggaatcatataataggaggctttt

SEQ ID NO: 1066759 - DNA, 33 bp, Homo sapien
ctcttcctccttgttccagactgtgaggaataa

SEQ ID NO: 1066760 - DNA, 33 bp, Homo sapien
ctcttcctccttgttctagactgtgaggaataa

SEQ ID NO: 1066761 - DNA, 33 bp, Homo sapien
acaatttaacattatccatcaaattttttgaat

SEQ ID NO: 1066762 - DNA, 33 bp, Homo sapien
acaatttaacattatcgatcaaattttttgaat

SEQ ID NO: 1066763 - DNA, 33 bp, Homo sapien
tattctagtcataggacgtatgttcagctttag

SEQ ID NO: 1066764 - DNA, 33 bp, Homo sapien
tattctagtcataggatgtatgttcagctttag

SEQ ID NO: 1066765 - DNA, 33 bp, Homo sapien
tctatattcttttttaaaatttcgcatgaatct

SEQ ID NO: 1066766 - DNA, 33 bp, Homo sapien
tctatattcttttttacaatttcgcatgaatct

SEQ ID NO: 1066767 - DNA, 33 bp, Homo sapien
cttgacctatctgacaatcattgttcttttaga

SEQ ID NO: 1066768 - DNA, 33 bp, Homo sapien
cttgacctatctgacagtcattgttcttttaga

SEQ ID NO: 1066769 - DNA, 33 bp, Homo sapien
ataatcagattgcagagcattgttgcaggtgcc

SEQ ID NO: 1066770 - DNA, 33 bp, Homo sapien
ataatcagattgcagatcattgttgcaggtgcc

SEQ ID NO: 1066771 - DNA, 33 bp, Homo sapien
gcgcccggcggaagaaaaatttatgtgttaaat

SEQ ID NO: 1066772 - DNA, 33 bp, Homo sapien
gcgcccggcggaagaacaatttatgtgttaaat

SEQ ID NO: 1066773 - DNA, 33 bp, Homo sapien
ttcagcaaagttgcaaatctcttaattgaaaaa

SEQ ID NO: 1066774 - DNA, 33 bp, Homo sapien
ttcagcaaagttgcaagtctcttaattgaaaaa

SEQ ID NO: 1066775 - DNA, 33 bp, Homo sapien
ttttgtatcacattacaactattgaagataact

SEQ ID NO: 1066776 - DNA, 33 bp, Homo sapien
ttttgtatcacattactactattgaagataact

SEQ ID NO: 1066777 - DNA, 33 bp, Homo sapien
aatacgatcttgggcaacgcattagagctaggt

SEQ ID NO: 1066778 - DNA, 33 bp, Homo sapien
aatacgatcttgggcagcgcattagagctaggt

SEQ ID NO: 1066779 - DNA, 33 bp, Homo sapien
gtacaaatgctagaaactgtaaggcatctgaaa

SEQ ID NO: 1066780 - DNA, 33 bp, Homo sapien
gtacaaatgctagaaattgtaaggcatctgaaa

SEQ ID NO: 1066781 - DNA, 33 bp, Homo sapien
acacattcttcactgacggtaaaaaatcgtatc

SEQ ID NO: 1066782 - DNA, 33 bp, Homo sapien
acacattcttcactgatggtaaaaaatcgtatc

SEQ ID NO: 1066783 - DNA, 33 bp, Homo sapien
acacagataccaattacggttgttgagcatcat

SEQ ID NO: 1066784 - DNA, 33 bp, Homo sapien
acacagataccaattatggttgttgagcatcat

SEQ ID NO: 1066785 - DNA, 33 bp, Homo sapien
tacttttcaaggtgtaacaaagaatacaattgg

SEQ ID NO: 1066786 - DNA, 33 bp, Homo sapien
tacttttcaaggtgtagcaaagaatacaattgg

SEQ ID NO: 1066787 - DNA, 33 bp, Homo sapien
tatttaaaatgcctcacgagaaaaatgatctta

SEQ ID NO: 1066788 - DNA, 33 bp, Homo sapien
tatttaaaatgcctcatgagaaaaatgatctta

SEQ ID NO: 1066789 - DNA, 33 bp, Homo sapien
caccacaagatagaccacatctgcagtatgaca

SEQ ID NO: 1066790 - DNA, 33 bp, Homo sapien
caccacaagatagaccgcatctgcagtatgaca

SEQ ID NO: 1066791 - DNA, 33 bp, Homo sapien
aaattctacttgatcaataataatgttaatgaa

SEQ ID NO: 1066792 - DNA, 33 bp, Homo sapien
aaattctacttgatcagtaataatgttaatgaa

SEQ ID NO: 1066793 - DNA, 33 bp, Homo sapien
aattgagtaggtggaaaaagcatcaactaaaga

SEQ ID NO: 1066794 - DNA, 33 bp, Homo sapien
aattgagtaggtggaagaagcatcaactaaaga

SEQ ID NO: 1066795 - DNA, 33 bp, Homo sapien
ttttcttatttaccacaggacataaatgcaagg

SEQ ID NO: 1066796 - DNA, 33 bp, Homo sapien
ttttcttatttaccaccggacataaatgcaagg

SEQ ID NO: 1066797 - DNA, 33 bp, Homo sapien
cctcattagaaagacaacttgagggcagctctt

SEQ ID NO: 1066798 - DNA, 33 bp, Homo sapien
cctcattagaaagacaccttgagggcagctctt

SEQ ID NO: 1066799 - DNA, 33 bp, Homo sapien
ctttctcaagaatgtaccctcaaagattcatag

SEQ ID NO: 1066800 - DNA, 33 bp, Homo sapien
ctttctcaagaatgtatcctcaaagattcatag

SEQ ID NO: 1066801 - DNA, 33 bp, Homo sapien
atttagtccttcactacataatgtcttcatttt

SEQ ID NO: 1066802 - DNA, 33 bp, Homo sapien
atttagtccttcactatataatgtcttcatttt

SEQ ID NO: 1066803 - DNA, 33 bp, Homo sapien
cttatataggagttaaatggtgtactggtgatg

SEQ ID NO: 1066804 - DNA, 33 bp, Homo sapien
cttatataggagttaactggtgtactggtgatg

SEQ ID NO: 1066805 - DNA, 33 bp, Homo sapien
taagaatcttattgcacagcatgaggactatag

SEQ ID NO: 1066806 - DNA, 33 bp, Homo sapien
taagaatcttattgcagagcatgaggactatag

SEQ ID NO: 1066807 - DNA, 33 bp, Homo sapien
tatcagcacattttgactaatagattagacagg

SEQ ID NO: 1066808 - DNA, 33 bp, Homo sapien
tatcagcacattttgattaatagattagacagg

SEQ ID NO: 1066809 - DNA, 33 bp, Homo sapien
atcgtgtaaacgcaaagtttctatggatgcaaa

SEQ ID NO: 1066810 - DNA, 33 bp, Homo sapien
atcgtgtaaacgcaaattttctatggatgcaaa

SEQ ID NO: 1066811 - DNA, 33 bp, Homo sapien
gtcccaagttttagaacagtggctaaatccatt

SEQ ID NO: 1066812 - DNA, 33 bp, Homo sapien
gtcccaagttttagaagagtggctaaatccatt

SEQ ID NO: 1066813 - DNA, 33 bp, Homo sapien
ttactaagccaagtaaaaaatggaagtgtttgg

SEQ ID NO: 1066814 - DNA, 33 bp, Homo sapien
ttactaagccaagtaagaaatggaagtgtttgg

SEQ ID NO: 1066815 - DNA, 33 bp, Homo sapien
tcctcagagcaataacaatgatagtgacagttc

SEQ ID NO: 1066816 - DNA, 33 bp, Homo sapien
tcctcagagcaataacgatgatagtgacagttc

SEQ ID NO: 1066817 - DNA, 33 bp, Homo sapien
tcaagacagattttcacgatcatatttcttttt

SEQ ID NO: 1066818 - DNA, 33 bp, Homo sapien
tcaagacagattttcaggatcatatttcttttt

SEQ ID NO: 1066819 - DNA, 33 bp, Homo sapien
ataatttgtcctgtacccctctaccatttttag

SEQ ID NO: 1066820 - DNA, 33 bp, Homo sapien
ataatttgtcctgtactcctctaccatttttag

SEQ ID NO: 1066821 - DNA, 33 bp, Homo sapien
aaatgatatatgtcaaactttaatacctgtgtc

SEQ ID NO: 1066822 - DNA, 33 bp, Homo sapien
aaatgatatatgtcaacctttaatacctgtgtc

SEQ ID NO: 1066823 - DNA, 33 bp, Homo sapien
gaataaacataaatcactcattcacaggtaata

SEQ ID NO: 1066824 - DNA, 33 bp, Homo sapien
gaataaacataaatcagtcattcacaggtaata

SEQ ID NO: 1066825 - DNA, 33 bp, Homo sapien
tttttcctgatcttagaacaagtgcttttattg

SEQ ID NO: 1066826 - DNA, 33 bp, Homo sapien
tttttcctgatcttaggacaagtgcttttattg

SEQ ID NO: 1066827 - DNA, 33 bp, Homo sapien
tgtcttctttcaagacaaattactgcatcacaa

SEQ ID NO: 1066828 - DNA, 33 bp, Homo sapien
tgtcttctttcaagacgaattactgcatcacaa

SEQ ID NO: 1066829 - DNA, 33 bp, Homo sapien
atttgttgatgacacccagatctaaaatccagg

SEQ ID NO: 1066830 - DNA, 33 bp, Homo sapien
atttgttgatgacacctagatctaaaatccagg

SEQ ID NO: 1066831 - DNA, 33 bp, Homo sapien
agcacagtaggaaaaacgtgacactaggaagaa

SEQ ID NO: 1066832 - DNA, 33 bp, Homo sapien
agcacagtaggaaaaaggtgacactaggaagaa

SEQ ID NO: 1066833 - DNA, 33 bp, Homo sapien
ttaatctctcatgtcccggaaatcccattgtgc

SEQ ID NO: 1066834 - DNA, 33 bp, Homo sapien
ttaatctctcatgtcctggaaatcccattgtgc

SEQ ID NO: 1066835 - DNA, 33 bp, Homo sapien
caacataaaaaggaaaactgattgacaagatga

SEQ ID NO: 1066836 - DNA, 33 bp, Homo sapien
caacataaaaaggaaatctgattgacaagatga

SEQ ID NO: 1066837 - DNA, 33 bp, Homo sapien
aataaagatgggaagacggttgaaaaggtcaat

SEQ ID NO: 1066838 - DNA, 33 bp, Homo sapien
aataaagatgggaagatggttgaaaaggtcaat

SEQ ID NO: 1066839 - DNA, 33 bp, Homo sapien
tggccaaagaggaaaactagatatgaactacca

SEQ ID NO: 1066840 - DNA, 33 bp, Homo sapien
tggccaaagaggaaaagtagatatgaactacca

SEQ ID NO: 1066841 - DNA, 33 bp, Homo sapien
atagatctcacacatacgtagttcacaatagag

SEQ ID NO: 1066842 - DNA, 33 bp, Homo sapien
atagatctcacacatatgtagttcacaatagag

SEQ ID NO: 1066843 - DNA, 33 bp, Homo sapien
cctgaggcaggattaacggacaataagaacatt

SEQ ID NO: 1066844 - DNA, 33 bp, Homo sapien
cctgaggcaggattaatggacaataagaacatt

SEQ ID NO: 1066845 - DNA, 33 bp, Homo sapien
gcacctggcctatttcaatgtttaatattagaa

SEQ ID NO: 1066846 - DNA, 33 bp, Homo sapien
gcacctggcctatttcgatgtttaatattagaa

SEQ ID NO: 1066847 - DNA, 33 bp, Homo sapien
atctaaggtgggagacaaggaattctgttgaag

SEQ ID NO: 1066848 - DNA, 33 bp, Homo sapien
atctaaggtgggagacgaggaattctgttgaag

SEQ ID NO: 1066849 - DNA, 33 bp, Homo sapien
ctcaagccactccacaagtcagttaatattgca

SEQ ID NO: 1066850 - DNA, 33 bp, Homo sapien
ctcaagccactccacatgtcagttaatattgca

SEQ ID NO: 1066851 - DNA, 33 bp, Homo sapien
aaaatatctgactataacatattccaaccagga

SEQ ID NO: 1066852 - DNA, 33 bp, Homo sapien
aaaatatctgactatatcatattccaaccagga

SEQ ID NO: 1066853 - DNA, 33 bp, Homo sapien
accttctagtcttatactagccttcactttcag

SEQ ID NO: 1066854 - DNA, 33 bp, Homo sapien
accttctagtcttatattagccttcactttcag

SEQ ID NO: 1066855 - DNA, 33 bp, Homo sapien
aaagtaggtccaataacgtcttgagcaacatgg

SEQ ID NO: 1066856 - DNA, 33 bp, Homo sapien
aaagtaggtccaataatgtcttgagcaacatgg

SEQ ID NO: 1066857 - DNA, 33 bp, Homo sapien
catactttccatgaaaacctcctgattcagaat

SEQ ID NO: 1066858 - DNA, 33 bp, Homo sapien
catactttccatgaaatcctcctgattcagaat

SEQ ID NO: 1066859 - DNA, 33 bp, Homo sapien
tccttcacttttttccaaatgaccttcttaagc

SEQ ID NO: 1066860 - DNA, 33 bp, Homo sapien
tccttcacttttttccgaatgaccttcttaagc

SEQ ID NO: 1066861 - DNA, 33 bp, Homo sapien
ctcctcagttctctggccactatataccactga

SEQ ID NO: 1066862 - DNA, 33 bp, Homo sapien
ctcctcagttctctggtcactatataccactga

SEQ ID NO: 1066863 - DNA, 33 bp, Homo sapien
ctttggcctcattaacactatgctctccccaaa

SEQ ID NO: 1066864 - DNA, 33 bp, Homo sapien
ctttggcctcattaacgctatgctctccccaaa

SEQ ID NO: 1066865 - DNA, 33 bp, Homo sapien
tatgggttcaacttgagggtcaacctgattgaa

SEQ ID NO: 1066866 - DNA, 33 bp, Homo sapien
tatgggttcaacttgatggtcaacctgattgaa

SEQ ID NO: 1066867 - DNA, 33 bp, Homo sapien
catggtcacaagggcacaggggctctccaacag

SEQ ID NO: 1066868 - DNA, 33 bp, Homo sapien
catggtcacaagggcataggggctctccaacag

SEQ ID NO: 1066869 - DNA, 33 bp, Homo sapien
atggcgacgaaagtaacgtctggttatcctcac

SEQ ID NO: 1066870 - DNA, 33 bp, Homo sapien
atggcgacgaaagtaatgtctggttatcctcac

SEQ ID NO: 1066871 - DNA, 33 bp, Homo sapien
gggcccaactatatccagatttggtgctacttg

SEQ ID NO: 1066872 - DNA, 33 bp, Homo sapien
gggcccaactatatccggatttggtgctacttg

SEQ ID NO: 1066873 - DNA, 33 bp, Homo sapien
atcagaattgccccaacaaaatggaatcaagta

SEQ ID NO: 1066874 - DNA, 33 bp, Homo sapien
atcagaattgccccaataaaatggaatcaagta

SEQ ID NO: 1066875 - DNA, 33 bp, Homo sapien
tcttactaatttcagaggtttgtaccttttggt

SEQ ID NO: 1066876 - DNA, 33 bp, Homo sapien
tcttactaatttcagatgtttgtaccttttggt

SEQ ID NO: 1066877 - DNA, 33 bp, Homo sapien
gaatgcagtgcttaaaaagctaaaagtagtaag

SEQ ID NO: 1066878 - DNA, 33 bp, Homo sapien
gaatgcagtgcttaaacagctaaaagtagtaag

SEQ ID NO: 1066879 - DNA, 33 bp, Homo sapien
aaaggaacgctatactcaaacacaattgtggta

SEQ ID NO: 1066880 - DNA, 33 bp, Homo sapien
aaaggaacgctatacttaaacacaattgtggta

SEQ ID NO: 1066881 - DNA, 33 bp, Homo sapien
gcagtggagtagcttacaaagaatgctgaagat

SEQ ID NO: 1066882 - DNA, 33 bp, Homo sapien
gcagtggagtagcttataaagaatgctgaagat

SEQ ID NO: 1066883 - DNA, 33 bp, Homo sapien
cctaaggtagagtgtacatgagacaaagaaaag

SEQ ID NO: 1066884 - DNA, 33 bp, Homo sapien
cctaaggtagagtgtagatgagacaaagaaaag

SEQ ID NO: 1066885 - DNA, 33 bp, Homo sapien
catacgttttggtgacaagagatgaagaatttg

SEQ ID NO: 1066886 - DNA, 33 bp, Homo sapien
catacgttttggtgaccagagatgaagaatttg

SEQ ID NO: 1066887 - DNA, 33 bp, Homo sapien
cagagtacttatcaaaaggtaccatactaaggc

SEQ ID NO: 1066888 - DNA, 33 bp, Homo sapien
cagagtacttatcaaacggtaccatactaaggc

SEQ ID NO: 1066889 - DNA, 33 bp, Homo sapien
cttcttccaccatcataagttgttgccacagtt

SEQ ID NO: 1066890 - DNA, 33 bp, Homo sapien
cttcttccaccatcatgagttgttgccacagtt

SEQ ID NO: 1066891 - DNA, 33 bp, Homo sapien
gtttctatccctttaactagaatgtgagctaca

SEQ ID NO: 1066892 - DNA, 33 bp, Homo sapien
gtttctatccctttaattagaatgtgagctaca

SEQ ID NO: 1066893 - DNA, 33 bp, Homo sapien
ttatggtctctctccactactagaatgtaaact

SEQ ID NO: 1066894 - DNA, 33 bp, Homo sapien
ttatggtctctctccattactagaatgtaaact

SEQ ID NO: 1066895 - DNA, 33 bp, Homo sapien
aggtaaacataatgacaaaacatcaaaacagag

SEQ ID NO: 1066896 - DNA, 33 bp, Homo sapien
aggtaaacataatgacgaaacatcaaaacagag

SEQ ID NO: 1066897 - DNA, 33 bp, Homo sapien
gagatcaaaatgcaaactgtactgggtaaatct

SEQ ID NO: 1066898 - DNA, 33 bp, Homo sapien
gagatcaaaatgcaaagtgtactgggtaaatct

SEQ ID NO: 1066899 - DNA, 33 bp, Homo sapien
cagcagtgtgcagactaaaaacctcatggtagt

SEQ ID NO: 1066900 - DNA, 33 bp, Homo sapien
cagcagtgtgcagactgaaaacctcatggtagt

SEQ ID NO: 1066901 - DNA, 33 bp, Homo sapien
aatacttgatgacacaaaaaggctctctaattc

SEQ ID NO: 1066902 - DNA, 33 bp, Homo sapien
aatacttgatgacacagaaaggctctctaattc

SEQ ID NO: 1066903 - DNA, 33 bp, Homo sapien
tgctcccatttgactgaagcgaatttagtcaga

SEQ ID NO: 1066904 - DNA, 33 bp, Homo sapien
tgctcccatttgactggagcgaatttagtcaga

SEQ ID NO: 1066905 - DNA, 33 bp, Homo sapien
tcccctcattcagtcaaggtgatacacaaaatc

SEQ ID NO: 1066906 - DNA, 33 bp, Homo sapien
tcccctcattcagtcacggtgatacacaaaatc

SEQ ID NO: 1066907 - DNA, 33 bp, Homo sapien
gaacacagggtttcaacagacattactccaaag

SEQ ID NO: 1066908 - DNA, 33 bp, Homo sapien
gaacacagggtttcaatagacattactccaaag

SEQ ID NO: 1066909 - DNA, 33 bp, Homo sapien
gatatcacatcacatacacactaaaatagctac

SEQ ID NO: 1066910 - DNA, 33 bp, Homo sapien
gatatcacatcacatatacactaaaatagctac

SEQ ID NO: 1066911 - DNA, 33 bp, Homo sapien
gtttgctatttccccactgaaagattgagagta

SEQ ID NO: 1066912 - DNA, 33 bp, Homo sapien
gtttgctatttccccattgaaagattgagagta

SEQ ID NO: 1066913 - DNA, 33 bp, Homo sapien
agttacttttctcttcactaatcataggaaaat

SEQ ID NO: 1066914 - DNA, 33 bp, Homo sapien
agttacttttctcttcgctaatcataggaaaat

SEQ ID NO: 1066915 - DNA, 33 bp, Homo sapien
cacaaccgtaatcacaatgctaatgaatgtgtg

SEQ ID NO: 1066916 - DNA, 33 bp, Homo sapien
cacaaccgtaatcacagtgctaatgaatgtgtg

SEQ ID NO: 1066917 - DNA, 33 bp, Homo sapien
ttatattgtctttagcaaactcttacattgaga

SEQ ID NO: 1066918 - DNA, 33 bp, Homo sapien
ttatattgtctttagccaactcttacattgaga

SEQ ID NO: 1066919 - DNA, 33 bp, Homo sapien
ttttctctatggccaacgaaagtaatttcttag

SEQ ID NO: 1066920 - DNA, 33 bp, Homo sapien
ttttctctatggccaatgaaagtaatttcttag

SEQ ID NO: 1066921 - DNA, 33 bp, Homo sapien
tgcctttaagctctgagcctactaaggatgata

SEQ ID NO: 1066922 - DNA, 33 bp, Homo sapien
tgcctttaagctctgatcctactaaggatgata

SEQ ID NO: 1066923 - DNA, 33 bp, Homo sapien
tagactgaatcaaaaaattcatgcaatatgtca

SEQ ID NO: 1066924 - DNA, 33 bp, Homo sapien
tagactgaatcaaaaatttcatgcaatatgtca

SEQ ID NO: 1066925 - DNA, 33 bp, Homo sapien
gttatttctcactttacgtacagtatgtataag

SEQ ID NO: 1066926 - DNA, 33 bp, Homo sapien
gttatttctcactttatgtacagtatgtataag

SEQ ID NO: 1066927 - DNA, 33 bp, Homo sapien
agcttggctcgctagaagaaaaaaaaaggaaag

SEQ ID NO: 1066928 - DNA, 33 bp, Homo sapien
agcttggctcgctagacgaaaaaaaaaggaaag

SEQ ID NO: 1066929 - DNA, 33 bp, Homo sapien
cacgaaaactcaccacaagcataatttacaaaa

SEQ ID NO: 1066930 - DNA, 33 bp, Homo sapien
cacgaaaactcaccacgagcataatttacaaaa

SEQ ID NO: 1066931 - DNA, 33 bp, Homo sapien
taagtgaggtctttagaaacgatggccctaaag

SEQ ID NO: 1066932 - DNA, 33 bp, Homo sapien
taagtgaggtctttaggaacgatggccctaaag

SEQ ID NO: 1066933 - DNA, 33 bp, Homo sapien
ttttctgaaagggatgacaaaagaagcctcaga

SEQ ID NO: 1066934 - DNA, 33 bp, Homo sapien
ttttctgaaagggatggcaaaagaagcctcaga

SEQ ID NO: 1066935 - DNA, 33 bp, Homo sapien
tggtgagccactgaggcattttatttcgtgtat

SEQ ID NO: 1066936 - DNA, 33 bp, Homo sapien
tggtgagccactgagggattttatttcgtgtat

SEQ ID NO: 1066937 - DNA, 33 bp, Homo sapien
aatgacctagacattccgaaattgaaagccaga

SEQ ID NO: 1066938 - DNA, 33 bp, Homo sapien
aatgacctagacattctgaaattgaaagccaga

SEQ ID NO: 1066939 - DNA, 33 bp, Homo sapien
ctatcaactttgaaaccctgtcaaaatcccaaa

SEQ ID NO: 1066940 - DNA, 33 bp, Homo sapien
ctatcaactttgaaactctgtcaaaatcccaaa

SEQ ID NO: 1066941 - DNA, 33 bp, Homo sapien
tctcttggcattaaggacctgtaataatccttc

SEQ ID NO: 1066942 - DNA, 33 bp, Homo sapien
tctcttggcattaaggtcctgtaataatccttc

SEQ ID NO: 1066943 - DNA, 33 bp, Homo sapien
taccaatctgagttaacgaaaatcttctttaat

SEQ ID NO: 1066944 - DNA, 33 bp, Homo sapien
taccaatctgagttaatgaaaatcttctttaat

SEQ ID NO: 1066945 - DNA, 33 bp, Homo sapien
atgtctcattgtctaccactccaattccccttt

SEQ ID NO: 1066946 - DNA, 33 bp, Homo sapien
atgtctcattgtctactactccaattccccttt

SEQ ID NO: 1066947 - DNA, 33 bp, Homo sapien
aagacaagccagtacaatatagcgagatcccac

SEQ ID NO: 1066948 - DNA, 33 bp, Homo sapien
aagacaagccagtacagtatagcgagatcccac

SEQ ID NO: 1066949 - DNA, 33 bp, Homo sapien
gtgtcttgatgcagtcactaagaattttattgt

SEQ ID NO: 1066950 - DNA, 33 bp, Homo sapien
gtgtcttgatgcagtcgctaagaattttattgt

SEQ ID NO: 1066951 - DNA, 33 bp, Homo sapien
ctttgcctgtgattaaagattgtgtggttcatg

SEQ ID NO: 1066952 - DNA, 33 bp, Homo sapien
ctttgcctgtgattaaggattgtgtggttcatg

SEQ ID NO: 1066953 - DNA, 33 bp, Homo sapien
tatctcttggaatactcagcaatgagccacagc

SEQ ID NO: 1066954 - DNA, 33 bp, Homo sapien
tatctcttggaatactgagcaatgagccacagc

SEQ ID NO: 1066955 - DNA, 33 bp, Homo sapien
ggaccaggaatgcacaaattaagttggcagctg

SEQ ID NO: 1066956 - DNA, 33 bp, Homo sapien
ggaccaggaatgcacagattaagttggcagctg

SEQ ID NO: 1066957 - DNA, 33 bp, Homo sapien
agtatcatattttaacaattcctgaaactaagt

SEQ ID NO: 1066958 - DNA, 33 bp, Homo sapien
agtatcatattttaacgattcctgaaactaagt

SEQ ID NO: 1066959 - DNA, 33 bp, Homo sapien
tcggaactcatgtattaaacctagaactcaata

SEQ ID NO: 1066960 - DNA, 33 bp, Homo sapien
tcggaactcatgtattcaacctagaactcaata

SEQ ID NO: 1066961 - DNA, 33 bp, Homo sapien
aatcctcaataatcacagaaaggagatgcaaat

SEQ ID NO: 1066962 - DNA, 33 bp, Homo sapien
aatcctcaataatcacggaaaggagatgcaaat

SEQ ID NO: 1066963 - DNA, 33 bp, Homo sapien
aaatggacaaggttaaagctcattatcaaattg

SEQ ID NO: 1066964 - DNA, 33 bp, Homo sapien
aaatggacaaggttaaggctcattatcaaattg

SEQ ID NO: 1066965 - DNA, 33 bp, Homo sapien
gtgatgtgatgtgaaccgagtgatatgaatagc

SEQ ID NO: 1066966 - DNA, 33 bp, Homo sapien
gtgatgtgatgtgaactgagtgatatgaatagc

SEQ ID NO: 1066967 - DNA, 33 bp, Homo sapien
ataaaactgatgaagcactgttaaatttgttct

SEQ ID NO: 1066968 - DNA, 33 bp, Homo sapien
ataaaactgatgaagccctgttaaatttgttct

SEQ ID NO: 1066969 - DNA, 33 bp, Homo sapien
ggtgctgaggaatacaatggctatcactacagt

SEQ ID NO: 1066970 - DNA, 33 bp, Homo sapien
ggtgctgaggaatacagtggctatcactacagt

SEQ ID NO: 1066971 - DNA, 33 bp, Homo sapien
gcaagactgtcgcagaagaaaatataaaattca

SEQ ID NO: 1066972 - DNA, 33 bp, Homo sapien
gcaagactgtcgcagatgaaaatataaaattca

SEQ ID NO: 1066973 - DNA, 33 bp, Homo sapien
gtcaatttgcttcttgaactactacagtgttct

SEQ ID NO: 1066974 - DNA, 33 bp, Homo sapien
gtcaatttgcttcttggactactacagtgttct

SEQ ID NO: 1066975 - DNA, 33 bp, Homo sapien
ggcagacataacacaacattatcaacactgcca

SEQ ID NO: 1066976 - DNA, 33 bp, Homo sapien
ggcagacataacacaagattatcaacactgcca

SEQ ID NO: 1066977 - DNA, 33 bp, Homo sapien
tcagagaattttttaccagaagacctgttatta

SEQ ID NO: 1066978 - DNA, 33 bp, Homo sapien
tcagagaattttttactagaagacctgttatta

SEQ ID NO: 1066979 - DNA, 33 bp, Homo sapien
aaggctgcaggattaacgatatgagggaaggtt

SEQ ID NO: 1066980 - DNA, 33 bp, Homo sapien
aaggctgcaggattaatgatatgagggaaggtt

SEQ ID NO: 1066981 - DNA, 33 bp, Homo sapien
ccctgtatttccataaaaagtctcagatttctt

SEQ ID NO: 1066982 - DNA, 33 bp, Homo sapien
ccctgtatttccataagaagtctcagatttctt

SEQ ID NO: 1066983 - DNA, 33 bp, Homo sapien
gttcacagcttcttcaaaaataagaaatgaatc

SEQ ID NO: 1066984 - DNA, 33 bp, Homo sapien
gttcacagcttcttcataaataagaaatgaatc

SEQ ID NO: 1066985 - DNA, 33 bp, Homo sapien
aaaaaatcccgattcacgtggaggtcacattct

SEQ ID NO: 1066986 - DNA, 33 bp, Homo sapien
aaaaaatcccgattcatgtggaggtcacattct

SEQ ID NO: 1066987 - DNA, 33 bp, Homo sapien
cattggctgtttagttaaaaaaaatgcaatatg

SEQ ID NO: 1066988 - DNA, 33 bp, Homo sapien
cattggctgtttagtttaaaaaaatgcaatatg

SEQ ID NO: 1066989 - DNA, 33 bp, Homo sapien
gctccccgtaatgtaaaactgtagaagaaacat

SEQ ID NO: 1066990 - DNA, 33 bp, Homo sapien
gctccccgtaatgtaacactgtagaagaaacat

SEQ ID NO: 1066991 - DNA, 33 bp, Homo sapien
tccttctccactcctgaattgagcgaagcggtg

SEQ ID NO: 1066992 - DNA, 33 bp, Homo sapien
tccttctccactcctggattgagcgaagcggtg

SEQ ID NO: 1066993 - DNA, 33 bp, Homo sapien; identical to SEQ ID NO: 1066991

SEQ ID NO: 1066994 - DNA, 33 bp, Homo sapien; identical to SEQ ID NO: 1066992

SEQ ID NO: 1066995 - DNA, 33 bp, Homo sapien; identical to SEQ ID NO: 1066991

SEQ ID NO: 1066996 - DNA, 33 bp, Homo sapien; identical to SEQ ID NO: 1066992

SEQ ID NO: 1066997 - DNA, 33 bp, Homo sapien; identical to SEQ ID NO: 1066991

SEQ ID NO: 1066998 - DNA, 33 bp, Homo sapien; identical to SEQ ID NO: 1066992

SEQ ID NO: 1066999 - DNA, 33 bp, Homo sapien; identical to SEQ ID NO: 1066991

SEQ ID NO: 1067000 - DNA, 33 bp, Homo sapien; identical to SEQ ID NO: 1066992

SEQ ID NO: 1067001 - DNA, 33 bp, Homo sapien; identical to SEQ ID NO: 1066991

SEQ ID NO: 1067002 - DNA, 33 bp, Homo sapien; identical to SEQ ID NO: 1066992

SEQ ID NO: 1067003 - DNA, 33 bp, Homo sapien
ttattgggtactgcaccgagacaagaaatggta

SEQ ID NO: 1067004 - DNA, 33 bp, Homo sapien
ttattgggtactgcactgagacaagaaatggta

SEQ ID NO: 1067005 - DNA, 33 bp, Homo sapien
acaggcaaagatagatcagacaggaggagtgcc

SEQ ID NO: 1067006 - DNA, 33 bp, Homo sapien
acaggcaaagatagatgagacaggaggagtgcc

SEQ ID NO: 1067007 - DNA, 33 bp, Homo sapien
gccctttgctgaggaaaaaacaccaaccatgct

SEQ ID NO: 1067008 - DNA, 33 bp, Homo sapien
gccctttgctgaggaataaacaccaaccatgct

SEQ ID NO: 1067009 - DNA, 33 bp, Homo sapien
gccgaagttcccaggaccaacaggacgacattc

SEQ ID NO: 1067010 - DNA, 33 bp, Homo sapien
gccgaagttcccaggatcaacaggacgacattc

SEQ ID NO: 1067011 - DNA, 33 bp, Homo sapien
tgctggggtacactcagaaaacgctgtaaatgg

SEQ ID NO: 1067012 - DNA, 33 bp, Homo sapien
tgctggggtacactcataaaacgctgtaaatgg

SEQ ID NO: 1067013 - DNA, 33 bp, Homo sapien
tggatgtatgaatgcacaaacaagtgaatgtgg

SEQ ID NO: 1067014 - DNA, 33 bp, Homo sapien
tggatgtatgaatgcagaaacaagtgaatgtgg

SEQ ID NO: 1067015 - DNA, 33 bp, Homo sapien
ttggtattttcaaagagcagacaaaagttggag

SEQ ID NO: 1067016 - DNA, 33 bp, Homo sapien
ttggtattttcaaagatcagacaaaagttggag

SEQ ID NO: 1067017 - DNA, 33 bp, Homo sapien
caagtgagctgattcacgggcctctgcatggct

SEQ ID NO: 1067018 - DNA, 33 bp, Homo sapien
caagtgagctgattcatgggcctctgcatggct

SEQ ID NO: 1067019 - DNA, 33 bp, Homo sapien
tttactacagtcgcccaattatgcaatcaaata

SEQ ID NO: 1067020 - DNA, 33 bp, Homo sapien
tttactacagtcgcccgattatgcaatcaaata

SEQ ID NO: 1067021 - DNA, 33 bp, Homo sapien
ctaacgtccgctgcagaaacacagtggcattga

SEQ ID NO: 1067022 - DNA, 33 bp, Homo sapien
ctaacgtccgctgcaggaacacagtggcattga

SEQ ID NO: 1067023 - DNA, 33 bp, Homo sapien
gaaaactctattcaaaactctgcactaaaggac

SEQ ID NO: 1067024 - DNA, 33 bp, Homo sapien
gaaaactctattcaaacctctgcactaaaggac

SEQ ID NO: 1067025 - DNA, 33 bp, Homo sapien
gagtggaattcctggaccacgtggtaattatac

SEQ ID NO: 1067026 - DNA, 33 bp, Homo sapien
gagtggaattcctggatcacgtggtaattatac

SEQ ID NO: 1067027 - DNA, 33 bp, Homo sapien
ttggggacctcagtgaatacactacaataatgc

SEQ ID NO: 1067028 - DNA, 33 bp, Homo sapien
ttggggacctcagtgagtacactacaataatgc

SEQ ID NO: 1067029 - DNA, 33 bp, Homo sapien
gctgttctgcagccaccgctgctgatacccaag

SEQ ID NO: 1067030 - DNA, 33 bp, Homo sapien
gctgttctgcagccactgctgctgatacccaag

SEQ ID NO: 1067031 - DNA, 33 bp, Homo sapien
cataaaggcacgtgcactattcgttgcatcact

SEQ ID NO: 1067032 - DNA, 33 bp, Homo sapien
cataaaggcacgtgcattattcgttgcatcact

SEQ ID NO: 1067033 - DNA, 33 bp, Homo sapien
gtcattttcttggatacgtaatgagtgtaaatt

SEQ ID NO: 1067034 - DNA, 33 bp, Homo sapien
gtcattttcttggatatgtaatgagtgtaaatt

SEQ ID NO: 1067035 - DNA, 33 bp, Homo sapien
ttacacaatttatatgaaatggataatcctagg

SEQ ID NO: 1067036 - DNA, 33 bp, Homo sapien
ttacacaatttatatgcaatggataatcctagg

SEQ ID NO: 1067037 - DNA, 33 bp, Homo sapien
agcaaacttggggaggaaagattaactgtgaaa

SEQ ID NO: 1067038 - DNA, 33 bp, Homo sapien
agcaaacttggggagggaagattaactgtgaaa

SEQ ID NO: 1067039 - DNA, 33 bp, Homo sapien
caatgctcagacattgaataatatctactggca

SEQ ID NO: 1067040 - DNA, 33 bp, Homo sapien
caatgctcagacattgcataatatctactggca

SEQ ID NO: 1067041 - DNA, 33 bp, Homo sapien
ggcctgcttcatagtcaatcaacaccagcttac

SEQ ID NO: 1067042 - DNA, 33 bp, Homo sapien
ggcctgcttcatagtcgatcaacaccagcttac

SEQ ID NO: 1067043 - DNA, 33 bp, Homo sapien
agaaacattttgataccgagtgtggtactagaa

SEQ ID NO: 1067044 - DNA, 33 bp, Homo sapien
agaaacattttgatactgagtgtggtactagaa

SEQ ID NO: 1067045 - DNA, 33 bp, Homo sapien
ttttccctgacaactggaacaggacaagaatgc

SEQ ID NO: 1067046 - DNA, 33 bp, Homo sapien
ttttccctgacaactgtaacaggacaagaatgc

SEQ ID NO: 1067047 - DNA, 33 bp, Homo sapien
acctgaagctagaacaacactgtttcttgcaca

SEQ ID NO: 1067048 - DNA, 33 bp, Homo sapien
acctgaagctagaacagcactgtttcttgcaca

SEQ ID NO: 1067049 - DNA, 33 bp, Homo sapien
caagaatctgtagcaaatgaagctctcatgttc

SEQ ID NO: 1067050 - DNA, 33 bp, Homo sapien
caagaatctgtagcaactgaagctctcatgttc

SEQ ID NO: 1067051 - DNA, 33 bp, Homo sapien
aaataataagaatgaagtacacctgttagttat

SEQ ID NO: 1067052 - DNA, 33 bp, Homo sapien
aaataataagaatgaattacacctgttagttat

SEQ ID NO: 1067053 - DNA, 33 bp, Homo sapien
tcaaaaatgggtgaagaaactgagtagactttc

SEQ ID NO: 1067054 - DNA, 33 bp, Homo sapien
tcaaaaatgggtgaagtaactgagtagactttc

SEQ ID NO: 1067055 - DNA, 33 bp, Homo sapien
cacttctttaagctacactttgtatcaatatgt

SEQ ID NO: 1067056 - DNA, 33 bp, Homo sapien
cacttctttaagctactctttgtatcaatatgt

SEQ ID NO: 1067057 - DNA, 33 bp, Homo sapien
cagagatgagctataaatcaatgcaatatggct

SEQ ID NO: 1067058 - DNA, 33 bp, Homo sapien
cagagatgagctataactcaatgcaatatggct

SEQ ID NO: 1067059 - DNA, 33 bp, Homo sapien
gtattgggaaatcaaccgctctctactagtaag

SEQ ID NO: 1067060 - DNA, 33 bp, Homo sapien
gtattgggaaatcaactgctctctactagtaag

SEQ ID NO: 1067061 - DNA, 33 bp, Homo sapien
aatttagcccagtacccaacagttatatttctt

SEQ ID NO: 1067062 - DNA, 33 bp, Homo sapien
aatttagcccagtaccgaacagttatatttctt

SEQ ID NO: 1067063 - DNA, 33 bp, Homo sapien
agggaagcaggtaattctgaagcaagtaatact

SEQ ID NO: 1067064 - DNA, 33 bp, Homo sapien
agggaagcaggtaattttgaagcaagtaatact

SEQ ID NO: 1067065 - DNA, 33 bp, Homo sapien
gcagcctgccattctacatgtaaggaaatatac

SEQ ID NO: 1067066 - DNA, 33 bp, Homo sapien
gcagcctgccattctagatgtaaggaaatatac

SEQ ID NO: 1067067 - DNA, 33 bp, Homo sapien
tgatgtctattggtaacgtagtatacttgcagt

SEQ ID NO: 1067068 - DNA, 33 bp, Homo sapien
tgatgtctattggtaatgtagtatacttgcagt

SEQ ID NO: 1067069 - DNA, 33 bp, Homo sapien
taattatacatgaaaaagttattgtcagaagaa

SEQ ID NO: 1067070 - DNA, 33 bp, Homo sapien
taattatacatgaaaaggttattgtcagaagaa

SEQ ID NO: 1067071 - DNA, 33 bp, Homo sapien
agtgagtctgtaatgacattttgttatgcttct

SEQ ID NO: 1067072 - DNA, 33 bp, Homo sapien
agtgagtctgtaatgatattttgttatgcttct

SEQ ID NO: 1067073 - DNA, 33 bp, Homo sapien
tatttaaatcaagctagagttagtttctattgc

SEQ ID NO: 1067074 - DNA, 33 bp, Homo sapien
tatttaaatcaagctatagttagtttctattgc

SEQ ID NO: 1067075 - DNA, 33 bp, Homo sapien
taggatggcaaaagcacaatgaaattccagagg

SEQ ID NO: 1067076 - DNA, 33 bp, Homo sapien
taggatggcaaaagcataatgaaattccagagg

SEQ ID NO: 1067077 - DNA, 33 bp, Homo sapien
ttgaaaaatgttcactaacacacttttacactg

SEQ ID NO: 1067078 - DNA, 33 bp, Homo sapien
ttgaaaaatgttcactgacacacttttacactg

SEQ ID NO: 1067079 - DNA, 33 bp, Homo sapien
acacagatgaaagaaagtctgaagtagactgag

SEQ ID NO: 1067080 - DNA, 33 bp, Homo sapien
acacagatgaaagaaattctgaagtagactgag

SEQ ID NO: 1067081 - DNA, 33 bp, Homo sapien
tttatttcattactcagctatggataaaattta

SEQ ID NO: 1067082 - DNA, 33 bp, Homo sapien
tttatttcattactcatctatggataaaattta

SEQ ID NO: 1067083 - DNA, 33 bp, Homo sapien
aaaatcttacctcacaatagctgctcaacagaa

SEQ ID NO: 1067084 - DNA, 33 bp, Homo sapien
aaaatcttacctcacagtagctgctcaacagaa

SEQ ID NO: 1067085 - DNA, 33 bp, Homo sapien
tatagagaagtatgaaaatggatcagagtgtaa

SEQ ID NO: 1067086 - DNA, 33 bp, Homo sapien
tatagagaagtatgaatatggatcagagtgtaa

SEQ ID NO: 1067087 - DNA, 33 bp, Homo sapien
caggatactttaccagacctcagagatacagat

SEQ ID NO: 1067088 - DNA, 33 bp, Homo sapien
caggatactttaccaggcctcagagatacagat

SEQ ID NO: 1067089 - DNA, 33 bp, Homo sapien
gtggctaacacaattgaaatgtaaaggtagagt

SEQ ID NO: 1067090 - DNA, 33 bp, Homo sapien
gtggctaacacaattgcaatgtaaaggtagagt

SEQ ID NO: 1067091 - DNA, 33 bp, Homo sapien
attgacatatgtctcaaagcctgctgtaatctc

SEQ ID NO: 1067092 - DNA, 33 bp, Homo sapien
attgacatatgtctcagagcctgctgtaatctc

SEQ ID NO: 1067093 - DNA, 33 bp, Homo sapien
actaaaataaaatctaagtctggaagcggccta

SEQ ID NO: 1067094 - DNA, 33 bp, Homo sapien
actaaaataaaatctatgtctggaagcggccta

SEQ ID NO: 1067095 - DNA, 33 bp, Homo sapien
ggctatttgaaaatacacaatcagaggagacca

SEQ ID NO: 1067096 - DNA, 33 bp, Homo sapien
ggctatttgaaaatacgcaatcagaggagacca

SEQ ID NO: 1067097 - DNA, 33 bp, Homo sapien
ggtttcctgtttctacactaatttgcttaggat

SEQ ID NO: 1067098 - DNA, 33 bp, Homo sapien
ggtttcctgtttctacgctaatttgcttaggat

SEQ ID NO: 1067099 - DNA, 33 bp, Homo sapien
gttacctatctcgatacaattctcaggaaaaca

SEQ ID NO: 1067100 - DNA, 33 bp, Homo sapien
gttacctatctcgatataattctcaggaaaaca

SEQ ID NO: 1067101 - DNA, 33 bp, Homo sapien
aaggagcaaaagatgcacagtagatctggggta

SEQ ID NO: 1067102 - DNA, 33 bp, Homo sapien
aaggagcaaaagatgcgcagtagatctggggta

SEQ ID NO: 1067103 - DNA, 33 bp, Homo sapien
tgaggaatatcccttacgcatagtagtactgaa

SEQ ID NO: 1067104 - DNA, 33 bp, Homo sapien
tgaggaatatcccttatgcatagtagtactgaa

SEQ ID NO: 1067105 - DNA, 33 bp, Homo sapien
acaatgaatctccactgactttagttatcatgg

SEQ ID NO: 1067106 - DNA, 33 bp, Homo sapien
acaatgaatctccacttactttagttatcatgg

SEQ ID NO: 1067107 - DNA, 33 bp, Homo sapien
tttcagaggcaacggtaacaggaaaagtactat

SEQ ID NO: 1067108 - DNA, 33 bp, Homo sapien
tttcagaggcaacggtgacaggaaaagtactat

SEQ ID NO: 1067109 - DNA, 33 bp, Homo sapien
agaagtctctgtctgcactctcaaataggtttt

SEQ ID NO: 1067110 - DNA, 33 bp, Homo sapien
agaagtctctgtctgcgctctcaaataggtttt

SEQ ID NO: 1067111 - DNA, 33 bp, Homo sapien
tcaaagccatttcaaaacctaggaaaattgaac

SEQ ID NO: 1067112 - DNA, 33 bp, Homo sapien
tcaaagccatttcaaagcctaggaaaattgaac

SEQ ID NO: 1067113 - DNA, 33 bp, Homo sapien
gagtacagttctagaacgtttatagctacatcc

SEQ ID NO: 1067114 - DNA, 33 bp, Homo sapien
gagtacagttctagaatgtttatagctacatcc

SEQ ID NO: 1067115 - DNA, 33 bp, Homo sapien
gaagcatatgccagtacggagagatagttgggt

SEQ ID NO: 1067116 - DNA, 33 bp, Homo sapien
gaagcatatgccagtatggagagatagttgggt

SEQ ID NO: 1067117 - DNA, 33 bp, Homo sapien
ataaaacagtacctcacagaactagatatttct

SEQ ID NO: 1067118 - DNA, 33 bp, Homo sapien
ataaaacagtacctcatagaactagatatttct

SEQ ID NO: 1067119 - DNA, 33 bp, Homo sapien
aaggttcctcgtagcactattattccaggctaa

SEQ ID NO: 1067120 - DNA, 33 bp, Homo sapien
aaggttcctcgtagcattattattccaggctaa

SEQ ID NO: 1067121 - DNA, 33 bp, Homo sapien
ggatttatctaatctcaaggacagtggtagcaa

SEQ ID NO: 1067122 - DNA, 33 bp, Homo sapien
ggatttatctaatctcgaggacagtggtagcaa

SEQ ID NO: 1067123 - DNA, 33 bp, Homo sapien
gtaattttgacaagaacagtactgaatctgtaa

SEQ ID NO: 1067124 - DNA, 33 bp, Homo sapien
gtaattttgacaagaatagtactgaatctgtaa

SEQ ID NO: 1067125 - DNA, 33 bp, Homo sapien
ctatggccttaaagacaccagtgaaatgatagt

SEQ ID NO: 1067126 - DNA, 33 bp, Homo sapien
ctatggccttaaagacgccagtgaaatgatagt

SEQ ID NO: 1067127 - DNA, 33 bp, Homo sapien
tgcctcacctactttaagactttgttcaaatat

SEQ ID NO: 1067128 - DNA, 33 bp, Homo sapien
tgcctcacctactttaggactttgttcaaatat

SEQ ID NO: 1067129 - DNA, 33 bp, Homo sapien
catctctttgcacttcaactcctgttcatagtt

SEQ ID NO: 1067130 - DNA, 33 bp, Homo sapien
catctctttgcacttctactcctgttcatagtt

SEQ ID NO: 1067131 - DNA, 33 bp, Homo sapien
tggcttatgcacagaaacgaccctcttctcttc

SEQ ID NO: 1067132 - DNA, 33 bp, Homo sapien
tggcttatgcacagaatcgaccctcttctcttc

SEQ ID NO: 1067133 - DNA, 33 bp, Homo sapien
ttaacaaaggagcacactctgtaagaaagatga

SEQ ID NO: 1067134 - DNA, 33 bp, Homo sapien
ttaacaaaggagcacagtctgtaagaaagatga

SEQ ID NO: 1067135 - DNA, 33 bp, Homo sapien
gtagagaagaaagaaaagctcttactctcatag

SEQ ID NO: 1067136 - DNA, 33 bp, Homo sapien
gtagagaagaaagaaatgctcttactctcatag

SEQ ID NO: 1067137 - DNA, 33 bp, Homo sapien
tatcaataaaggctcaccgaactttgatatatt

SEQ ID NO: 1067138 - DNA, 33 bp, Homo sapien
tatcaataaaggctcatcgaactttgatatatt

SEQ ID NO: 1067139 - DNA, 33 bp, Homo sapien
agtcattcagagaccaataaaaattaatcgcct

SEQ ID NO: 1067140 - DNA, 33 bp, Homo sapien
agtcattcagagaccagtaaaaattaatcgcct

SEQ ID NO: 1067141 - DNA, 33 bp, Homo sapien
ttcctctacttgaaaacaaggtgcttttattac

SEQ ID NO: 1067142 - DNA, 33 bp, Homo sapien
ttcctctacttgaaaagaaggtgcttttattac

SEQ ID NO: 1067143 - DNA, 33 bp, Homo sapien
aggactttgaaagtcaaccagaaaagtctagat

SEQ ID NO: 1067144 - DNA, 33 bp, Homo sapien
aggactttgaaagtcacccagaaaagtctagat

SEQ ID NO: 1067145 - DNA, 33 bp, Homo sapien
gtatttggtagcacaacgaggtagctatagtca

SEQ ID NO: 1067146 - DNA, 33 bp, Homo sapien
gtatttggtagcacaatgaggtagctatagtca

SEQ ID NO: 1067147 - DNA, 33 bp, Homo sapien
ggtttaagtttagctgcagcagagattcagaat

SEQ ID NO: 1067148 - DNA, 33 bp, Homo sapien
ggtttaagtttagctgtagcagagattcagaat

SEQ ID NO: 1067149 - DNA, 33 bp, Homo sapien
agtattttgtgtattacattgccttgtaagtga

SEQ ID NO: 1067150 - DNA, 33 bp, Homo sapien
agtattttgtgtattatattgccttgtaagtga

SEQ ID NO: 1067151 - DNA, 33 bp, Homo sapien
taatatgatttttccaaccttttaatttcaagt

SEQ ID NO: 1067152 - DNA, 33 bp, Homo sapien
taatatgatttttccatccttttaatttcaagt

SEQ ID NO: 1067153 - DNA, 33 bp, Homo sapien
cgcaaaaaagcgttcaaataatccccaggaaga

SEQ ID NO: 1067154 - DNA, 33 bp, Homo sapien
cgcaaaaaagcgttcagataatccccaggaaga

SEQ ID NO: 1067155 - DNA, 33 bp, Homo sapien
atgttcattccatcaacatggcaaagtgaccta

SEQ ID NO: 1067156 - DNA, 33 bp, Homo sapien
atgttcattccatcaatatggcaaagtgaccta

SEQ ID NO: 1067157 - DNA, 33 bp, Homo sapien
tccctctcctctcctcaacaagaaggaagaatg

SEQ ID NO: 1067158 - DNA, 33 bp, Homo sapien
tccctctcctctcctcgacaagaaggaagaatg

SEQ ID NO: 1067159 - DNA, 33 bp, Homo sapien
acagtggaatctgctaacaaagacttgaggagt

SEQ ID NO: 1067160 - DNA, 33 bp, Homo sapien
acagtggaatctgctagcaaagacttgaggagt

SEQ ID NO: 1067161 - DNA, 33 bp, Homo sapien
actctaaaattgatcaaatagttagaagtaaaa

SEQ ID NO: 1067162 - DNA, 33 bp, Homo sapien
actctaaaattgatcagatagttagaagtaaaa

SEQ ID NO: 1067163 - DNA, 33 bp, Homo sapien
agatgaatgtatatgcccttttttggagtagaa

SEQ ID NO: 1067164 - DNA, 33 bp, Homo sapien
agatgaatgtatatgctcttttttggagtagaa

SEQ ID NO: 1067165 - DNA, 33 bp, Homo sapien
actttatctagtgataaaaggaatgaattgttg

SEQ ID NO: 1067166 - DNA, 33 bp, Homo sapien
actttatctagtgatagaaggaatgaattgttg

SEQ ID NO: 1067167 - DNA, 33 bp, Homo sapien
gtaatgtgttaggagaagtgtgcttgtgtgcat

SEQ ID NO: 1067168 - DNA, 33 bp, Homo sapien
gtaatgtgttaggagatgtgtgcttgtgtgcat

SEQ ID NO: 1067169 - DNA, 33 bp, Homo sapien
cagacctttaacaagaatcagaagaacatataa

SEQ ID NO: 1067170 - DNA, 33 bp, Homo sapien
cagacctttaacaagagtcagaagaacatataa

SEQ ID NO: 1067171 - DNA, 33 bp, Homo sapien
ttttgcaattcagggaagatttgggcattttat

SEQ ID NO: 1067172 - DNA, 33 bp, Homo sapien
ttttgcaattcagggaggatttgggcattttat

SEQ ID NO: 1067173 - DNA, 33 bp, Homo sapien
gaaacagaccaagataaatatagttgactgatc

SEQ ID NO: 1067174 - DNA, 33 bp, Homo sapien
gaaacagaccaagatatatatagttgactgatc

SEQ ID NO: 1067175 - DNA, 33 bp, Homo sapien
gacagctccttcataggctagcattgagtgtct

SEQ ID NO: 1067176 - DNA, 33 bp, Homo sapien
gacagctccttcatagtctagcattgagtgtct

SEQ ID NO: 1067177 - DNA, 33 bp, Homo sapien
atcaatccacaacttccctgtataaaaatgaag

SEQ ID NO: 1067178 - DNA, 33 bp, Homo sapien
atcaatccacaacttctctgtataaaaatgaag

SEQ ID NO: 1067179 - DNA, 33 bp, Homo sapien
taagttcggttgcacaatctttacatacagagt

SEQ ID NO: 1067180 - DNA, 33 bp, Homo sapien
taagttcggttgcacattctttacatacagagt

SEQ ID NO: 1067181 - DNA, 33 bp, Homo sapien
gtcatttctagttctaaatcataccatctcaca

SEQ ID NO: 1067182 - DNA, 33 bp, Homo sapien
gtcatttctagttctagatcataccatctcaca

SEQ ID NO: 1067183 - DNA, 33 bp, Homo sapien
tatcttgatcactaaacggaaaagttcttcaga

SEQ ID NO: 1067184 - DNA, 33 bp, Homo sapien
tatcttgatcactaaatggaaaagttcttcaga

SEQ ID NO: 1067185 - DNA, 33 bp, Homo sapien
gtatgtgagaaatggacaaataggcaagatcta

SEQ ID NO: 1067186 - DNA, 33 bp, Homo sapien
gtatgtgagaaatggataaataggcaagatcta

SEQ ID NO: 1067187 - DNA, 33 bp, Homo sapien
aggatttgattcaaccaggtgttcgagaggcag

SEQ ID NO: 1067188 - DNA, 33 bp, Homo sapien
aggatttgattcaaccgggtgttcgagaggcag

SEQ ID NO: 1067189 - DNA, 33 bp, Homo sapien
gatttctgactggaaccctatcctgctgtggct

SEQ ID NO: 1067190 - DNA, 33 bp, Homo sapien
gatttctgactggaactctatcctgctgtggct

SEQ ID NO: 1067191 - DNA, 33 bp, Homo sapien
taaatttcaatgcctcaaaaatataatcaacct

SEQ ID NO: 1067192 - DNA, 33 bp, Homo sapien
taaatttcaatgcctcgaaaatataatcaacct

SEQ ID NO: 1067193 - DNA, 33 bp, Homo sapien
tgcagtgaatcacacccaaagttagcacagcac

SEQ ID NO: 1067194 - DNA, 33 bp, Homo sapien
tgcagtgaatcacacctaaagttagcacagcac

SEQ ID NO: 1067195 - DNA, 33 bp, Homo sapien
attatcttaagaaagcgcagcatgttgcaagag

SEQ ID NO: 1067196 - DNA, 33 bp, Homo sapien
attatcttaagaaagctcagcatgttgcaagag

SEQ ID NO: 1067197 - DNA, 33 bp, Homo sapien
aattttaggtcttataacatggtcaaaaagaca

SEQ ID NO: 1067198 - DNA, 33 bp, Homo sapien
aattttaggtcttataccatggtcaaaaagaca

SEQ ID NO: 1067199 - DNA, 33 bp, Homo sapien
tgcgaaaggactgaaaaatgaagaaagaaaaaa

SEQ ID NO: 1067200 - DNA, 33 bp, Homo sapien
tgcgaaaggactgaaacatgaagaaagaaaaaa

SEQ ID NO: 1067201 - DNA, 33 bp, Homo sapien
ctccccttcagtataactcatgtcaacgatgag

SEQ ID NO: 1067202 - DNA, 33 bp, Homo sapien
ctccccttcagtataattcatgtcaacgatgag

SEQ ID NO: 1067203 - DNA, 33 bp, Homo sapien
tctcccttcctaagatcagaccctatttcaaat

SEQ ID NO: 1067204 - DNA, 33 bp, Homo sapien
tctcccttcctaagatgagaccctatttcaaat

SEQ ID NO: 1067205 - DNA, 33 bp, Homo sapien
gttggcactttgaggaacattaacttgtcatca

SEQ ID NO: 1067206 - DNA, 33 bp, Homo sapien
gttggcactttgaggagcattaacttgtcatca

SEQ ID NO: 1067207 - DNA, 33 bp, Homo sapien
atatgtatgcctatcaaattgttccaacatatt

SEQ ID NO: 1067208 - DNA, 33 bp, Homo sapien
atatgtatgcctatcacattgttccaacatatt

SEQ ID NO: 1067209 - DNA, 33 bp, Homo sapien
caaattttagaggaaacgctatcagattttcct

SEQ ID NO: 1067210 - DNA, 33 bp, Homo sapien
caaattttagaggaaaggctatcagattttcct

SEQ ID NO: 1067211 - DNA, 33 bp, Homo sapien
tctgccactgacttatcaatcatgtttgtgtaa

SEQ ID NO: 1067212 - DNA, 33 bp, Homo sapien
tctgccactgacttatgaatcatgtttgtgtaa

SEQ ID NO: 1067213 - DNA, 33 bp, Homo sapien
aaactcagagagtttcacagcatcttcattctc

SEQ ID NO: 1067214 - DNA, 33 bp, Homo sapien
aaactcagagagtttcgcagcatcttcattctc

SEQ ID NO: 1067215 - DNA, 33 bp, Homo sapien
caattctgccttatgaatagtcaatggaaatct

SEQ ID NO: 1067216 - DNA, 33 bp, Homo sapien
caattctgccttatgagtagtcaatggaaatct

SEQ ID NO: 1067217 - DNA, 33 bp, Homo sapien
agagtagtaattatcaactgaatgtgagtttgt

SEQ ID NO: 1067218 - DNA, 33 bp, Homo sapien
agagtagtaattatcacctgaatgtgagtttgt

SEQ ID NO: 1067219 - DNA, 33 bp, Homo sapien
agctgatattaaagacccggccacaatatgagt

SEQ ID NO: 1067220 - DNA, 33 bp, Homo sapien
agctgatattaaagactcggccacaatatgagt

SEQ ID NO: 1067221 - DNA, 33 bp, Homo sapien
taaaaataaaatagtagcaaccatcaggaaata

SEQ ID NO: 1067222 - DNA, 33 bp, Homo sapien
taaaaataaaatagtatcaaccatcaggaaata

SEQ ID NO: 1067223 - DNA, 33 bp, Homo sapien
ctttcaagcaacagaaactgctttctttcattt

SEQ ID NO: 1067224 - DNA, 33 bp, Homo sapien
ctttcaagcaacagaatctgctttctttcattt

SEQ ID NO: 1067225 - DNA, 33 bp, Homo sapien
attcttttgtttgctcaaagatgctgttgacta

SEQ ID NO: 1067226 - DNA, 33 bp, Homo sapien
attcttttgtttgctcgaagatgctgttgacta

SEQ ID NO: 1067227 - DNA, 33 bp, Homo sapien
ataaatagatatttgaggtggtaatgcaaatag

SEQ ID NO: 1067228 - DNA, 33 bp, Homo sapien
ataaatagatatttgatgtggtaatgcaaatag

SEQ ID NO: 1067229 - DNA, 33 bp, Homo sapien
gttctttgctctagtacagactgtgttaggaaa

SEQ ID NO: 1067230 - DNA, 33 bp, Homo sapien
gttctttgctctagtatagactgtgttaggaaa

SEQ ID NO: 1067231 - DNA, 33 bp, Homo sapien
aaatactgtttgacccagcaagcccattactgg

SEQ ID NO: 1067232 - DNA, 33 bp, Homo sapien
aaatactgtttgacccggcaagcccattactgg

SEQ ID NO: 1067233 - DNA, 33 bp, Homo sapien
tacctgggcagctagacggcattccctggtact

SEQ ID NO: 1067234 - DNA, 33 bp, Homo sapien
tacctgggcagctagatggcattccctggtact

SEQ ID NO: 1067235 - DNA, 33 bp, Homo sapien
ctcatgacctaaacaccgctgaaaaggctccat

SEQ ID NO: 1067236 - DNA, 33 bp, Homo sapien
ctcatgacctaaacactgctgaaaaggctccat

SEQ ID NO: 1067237 - DNA, 33 bp, Homo sapien
agaataaaggttgcaaacattgtaattctttca

SEQ ID NO: 1067238 - DNA, 33 bp, Homo sapien
agaataaaggttgcaagcattgtaattctttca

SEQ ID NO: 1067239 - DNA, 33 bp, Homo sapien
actaagcttgaatgtaaaagagttaagtgtccc

SEQ ID NO: 1067240 - DNA, 33 bp, Homo sapien
actaagcttgaatgtagaagagttaagtgtccc

SEQ ID NO: 1067241 - DNA, 33 bp, Homo sapien
tgtcattttgctgcccaagtaggtagctgtaat

SEQ ID NO: 1067242 - DNA, 33 bp, Homo sapien
tgtcattttgctgcccgagtaggtagctgtaat

SEQ ID NO: 1067243 - DNA, 33 bp, Homo sapien
gtgctgtgaattcagacagataggtagctgggt

SEQ ID NO: 1067244 - DNA, 33 bp, Homo sapien
gtgctgtgaattcagatagataggtagctgggt

SEQ ID NO: 1067245 - DNA, 33 bp, Homo sapien
aaagagcagcttaaatgacaggtgaaaaatggc

SEQ ID NO: 1067246 - DNA, 33 bp, Homo sapien
aaagagcagcttaaattacaggtgaaaaatggc

SEQ ID NO: 1067247 - DNA, 33 bp, Homo sapien
gaactttccaaaagtggactgaattactctctg

SEQ ID NO: 1067248 - DNA, 33 bp, Homo sapien
gaactttccaaaagtgtactgaattactctctg

SEQ ID NO: 1067249 - DNA, 33 bp, Homo sapien
tgttagtatgttgaaacgtgcttgatttttttt

SEQ ID NO: 1067250 - DNA, 33 bp, Homo sapien
tgttagtatgttgaaatgtgcttgatttttttt

SEQ ID NO: 1067251 - DNA, 33 bp, Homo sapien
catacaataatacttaacaaaatggaataaagt

SEQ ID NO: 1067252 - DNA, 33 bp, Homo sapien
catacaataatacttagcaaaatggaataaagt

SEQ ID NO: 1067253 - DNA, 33 bp, Homo sapien
acaactctgcatatcaccaatcgtattgggtct

SEQ ID NO: 1067254 - DNA, 33 bp, Homo sapien
acaactctgcatatcatcaatcgtattgggtct

SEQ ID NO: 1067255 - DNA, 33 bp, Homo sapien
gagtgtcttcaaggtcaaagatattttcattat

SEQ ID NO: 1067256 - DNA, 33 bp, Homo sapien
gagtgtcttcaaggtccaagatattttcattat

SEQ ID NO: 1067257 - DNA, 33 bp, Homo sapien
agaactagaaactgggcatatcaatggagatgg

SEQ ID NO: 1067258 - DNA, 33 bp, Homo sapien
agaactagaaactggggatatcaatggagatgg

SEQ ID NO: 1067259 - DNA, 33 bp, Homo sapien
ctgctatataatgacaagctcataagaacatca

SEQ ID NO: 1067260 - DNA, 33 bp, Homo sapien
ctgctatataatgacaggctcataagaacatca

SEQ ID NO: 1067261 - DNA, 33 bp, Homo sapien
tcttcaaagtatcacaagagctaaaaatatttt

SEQ ID NO: 1067262 - DNA, 33 bp, Homo sapien
tcttcaaagtatcacaggagctaaaaatatttt

SEQ ID NO: 1067263 - DNA, 33 bp, Homo sapien
acctaagaccagtataaccatcagcatgcaact

SEQ ID NO: 1067264 - DNA, 33 bp, Homo sapien
acctaagaccagtatagccatcagcatgcaact

SEQ ID NO: 1067265 - DNA, 33 bp, Homo sapien
gacaaaattgcccagtaacacacttctcagaat

SEQ ID NO: 1067266 - DNA, 33 bp, Homo sapien
gacaaaattgcccagtgacacacttctcagaat

SEQ ID NO: 1067267 - DNA, 33 bp, Homo sapien
actaggcagggtgaagacaaggcccaagctgag

SEQ ID NO: 1067268 - DNA, 33 bp, Homo sapien
actaggcagggtgaagccaaggcccaagctgag

SEQ ID NO: 1067269 - DNA, 33 bp, Homo sapien
actggagcttacttacgacagtcacagtccagt

SEQ ID NO: 1067270 - DNA, 33 bp, Homo sapien
actggagcttacttactacagtcacagtccagt

SEQ ID NO: 1067271 - DNA, 33 bp, Homo sapien
cactgtcaattacaagaccctggatactttgga

SEQ ID NO: 1067272 - DNA, 33 bp, Homo sapien
cactgtcaattacaaggccctggatactttgga

SEQ ID NO: 1067273 - DNA, 33 bp, Homo sapien
gatatatgctgtgaacactcaccagaactaaac

SEQ ID NO: 1067274 - DNA, 33 bp, Homo sapien
gatatatgctgtgaacgctcaccagaactaaac

SEQ ID NO: 1067275 - DNA, 33 bp, Homo sapien
ccactgtgtgttctggacaattttgtcaaaaat

SEQ ID NO: 1067276 - DNA, 33 bp, Homo sapien
ccactgtgtgttctgggcaattttgtcaaaaat

SEQ ID NO: 1067277 - DNA, 33 bp, Homo sapien
tttagagtatattttaaagtgtggtagcctgat

SEQ ID NO: 1067278 - DNA, 33 bp, Homo sapien
tttagagtatattttacagtgtggtagcctgat

SEQ ID NO: 1067279 - DNA, 33 bp, Homo sapien
taccaaatatcaactaagcaatttctatgtaag

SEQ ID NO: 1067280 - DNA, 33 bp, Homo sapien
taccaaatatcaactaggcaatttctatgtaag

SEQ ID NO: 1067281 - DNA, 33 bp, Homo sapien
tccttcaggtattagaagaaggacagtaagagc

SEQ ID NO: 1067282 - DNA, 33 bp, Homo sapien
tccttcaggtattagatgaaggacagtaagagc

SEQ ID NO: 1067283 - DNA, 33 bp, Homo sapien
aaatagcctagaaatgaaagtaagcaatgatta

SEQ ID NO: 1067284 - DNA, 33 bp, Homo sapien
aaatagcctagaaatggaagtaagcaatgatta

SEQ ID NO: 1067285 - DNA, 33 bp, Homo sapien
atgcctcccaaataaacatcccagagcattagc

SEQ ID NO: 1067286 - DNA, 33 bp, Homo sapien
atgcctcccaaataaatatcccagagcattagc

SEQ ID NO: 1067287 - DNA, 33 bp, Homo sapien
tggactatgtactacaatcaaagcaatcatcac

SEQ ID NO: 1067288 - DNA, 33 bp, Homo sapien
tggactatgtactacagtcaaagcaatcatcac

SEQ ID NO: 1067289 - DNA, 33 bp, Homo sapien
aacataagaccgaataccatcaaaaccctagag

SEQ ID NO: 1067290 - DNA, 33 bp, Homo sapien
aacataagaccgaatagcatcaaaaccctagag

SEQ ID NO: 1067291 - DNA, 33 bp, Homo sapien
gtaagcagttggaaaaagattgtgctcctaaga

SEQ ID NO: 1067292 - DNA, 33 bp, Homo sapien
gtaagcagttggaaaaggattgtgctcctaaga

SEQ ID NO: 1067293 - DNA, 33 bp, Homo sapien
ctaactcagaaaagcactattgctctgggctat

SEQ ID NO: 1067294 - DNA, 33 bp, Homo sapien
ctaactcagaaaagcagtattgctctgggctat

SEQ ID NO: 1067295 - DNA, 33 bp, Homo sapien
tttattcaaaatctacaatgtgtcaagtactct

SEQ ID NO: 1067296 - DNA, 33 bp, Homo sapien
tttattcaaaatctactatgtgtcaagtactct

SEQ ID NO: 1067297 - DNA, 33 bp, Homo sapien
gatccaacagtcacctaaaagctaaagtcttct

SEQ ID NO: 1067298 - DNA, 33 bp, Homo sapien
gatccaacagtcaccttaaagctaaagtcttct

SEQ ID NO: 1067299 - DNA, 33 bp, Homo sapien
aagtgtcttgtagaacccttatgcttttagcat

SEQ ID NO: 1067300 - DNA, 33 bp, Homo sapien
aagtgtcttgtagaactcttatgcttttagcat

SEQ ID NO: 1067301 - DNA, 33 bp, Homo sapien
tatacacaatagaatacattttgaccataaaaa

SEQ ID NO: 1067302 - DNA, 33 bp, Homo sapien
tatacacaatagaatatattttgaccataaaaa

SEQ ID NO: 1067303 - DNA, 33 bp, Homo sapien
ttgaaatagtccaaacacatggaaatgataaaa

SEQ ID NO: 1067304 - DNA, 33 bp, Homo sapien
ttgaaatagtccaaacgcatggaaatgataaaa

SEQ ID NO: 1067305 - DNA, 33 bp, Homo sapien
tgcagtcaaactagtaggaaatgttagagtgat

SEQ ID NO: 1067306 - DNA, 33 bp, Homo sapien
tgcagtcaaactagtatgaaatgttagagtgat

SEQ ID NO: 1067307 - DNA, 33 bp, Homo sapien
aacaaatgaatgggtcacttttaatggatgaga

SEQ ID NO: 1067308 - DNA, 33 bp, Homo sapien
aacaaatgaatgggtcgcttttaatggatgaga

SEQ ID NO: 1067309 - DNA, 33 bp, Homo sapien
gacaggagtcaacaacaagtttaggtagagaag

SEQ ID NO: 1067310 - DNA, 33 bp, Homo sapien
gacaggagtcaacaaccagtttaggtagagaag

SEQ ID NO: 1067311 - DNA, 33 bp, Homo sapien
agcaattccatttgaacctattccgtttgaaag

SEQ ID NO: 1067312 - DNA, 33 bp, Homo sapien
agcaattccatttgaagctattccgtttgaaag

SEQ ID NO: 1067313 - DNA, 33 bp, Homo sapien
gaggaacactgtataactccctttaaagcattt

SEQ ID NO: 1067314 - DNA, 33 bp, Homo sapien
gaggaacactgtataattccctttaaagcattt

SEQ ID NO: 1067315 - DNA, 33 bp, Homo sapien
actagagcttgtgaataaaaattaagaaggatg

SEQ ID NO: 1067316 - DNA, 33 bp, Homo sapien
actagagcttgtgaatcaaaattaagaaggatg

SEQ ID NO: 1067317 - DNA, 33 bp, Homo sapien
tggaacttgcttacataatcatctggcttgatt

SEQ ID NO: 1067318 - DNA, 33 bp, Homo sapien
tggaacttgcttacatgatcatctggcttgatt

SEQ ID NO: 1067319 - DNA, 33 bp, Homo sapien
actggtatcatctccaagcctgaaatcaccatc

SEQ ID NO: 1067320 - DNA, 33 bp, Homo sapien
actggtatcatctccaggcctgaaatcaccatc

SEQ ID NO: 1067321 - DNA, 33 bp, Homo sapien
tgttgttctctgttggaaatgtgtaacatagta

SEQ ID NO: 1067322 - DNA, 33 bp, Homo sapien
tgttgttctctgttgggaatgtgtaacatagta

SEQ ID NO: 1067323 - DNA, 33 bp, Homo sapien
cttactctccatttccaaaattataggcttaac

SEQ ID NO: 1067324 - DNA, 33 bp, Homo sapien
cttactctccatttccgaaattataggcttaac

SEQ ID NO: 1067325 - DNA, 33 bp, Homo sapien
gtggtaattaaggagaaaagcagttatccagct

SEQ ID NO: 1067326 - DNA, 33 bp, Homo sapien
gtggtaattaaggagacaagcagttatccagct

SEQ ID NO: 1067327 - DNA, 33 bp, Homo sapien
gcagtggaggtttctgaaatgagctatagggta

SEQ ID NO: 1067328 - DNA, 33 bp, Homo sapien
gcagtggaggtttctggaatgagctatagggta

SEQ ID NO: 1067329 - DNA, 33 bp, Homo sapien
gaaggccattatataggatctggtttatatctt

SEQ ID NO: 1067330 - DNA, 33 bp, Homo sapien
gaaggccattatatagtatctggtttatatctt

SEQ ID NO: 1067331 - DNA, 33 bp, Homo sapien
tccagtgtttgtctagaagtatggaaacatcaa

SEQ ID NO: 1067332 - DNA, 33 bp, Homo sapien
tccagtgtttgtctaggagtatggaaacatcaa

SEQ ID NO: 1067333 - DNA, 33 bp, Homo sapien
cgtccttagtcataaacagccattgaatcggtg

SEQ ID NO: 1067334 - DNA, 33 bp, Homo sapien
cgtccttagtcataaagagccattgaatcggtg

SEQ ID NO: 1067335 - DNA, 33 bp, Homo sapien
tctcccatcccacacaatcttcttacaaagtaa

SEQ ID NO: 1067336 - DNA, 33 bp, Homo sapien
tctcccatcccacacattcttcttacaaagtaa

SEQ ID NO: 1067337 - DNA, 33 bp, Homo sapien
acatgatttagcgcatgatatcaatttgcattt

SEQ ID NO: 1067338 - DNA, 33 bp, Homo sapien
acatgatttagcgcattatatcaatttgcattt

SEQ ID NO: 1067339 - DNA, 33 bp, Homo sapien
tggaggccctggttgaaagatcccactcggaga

SEQ ID NO: 1067340 - DNA, 33 bp, Homo sapien
tggaggccctggttgagagatcccactcggaga

SEQ ID NO: 1067341 - DNA, 33 bp, Homo sapien
tgggatcacttaggaaactcataatcatggcag

SEQ ID NO: 1067342 - DNA, 33 bp, Homo sapien
tgggatcacttaggaatctcataatcatggcag

SEQ ID NO: 1067343 - DNA, 33 bp, Homo sapien
atagaaaggttttcatcaaagagcatatgtggt

SEQ ID NO: 1067344 - DNA, 33 bp, Homo sapien
atagaaaggttttcattaaagagcatatgtggt

SEQ ID NO: 1067345 - DNA, 33 bp, Homo sapien
ttggattgagtttcaacgtattcctgcatcttg

SEQ ID NO: 1067346 - DNA, 33 bp, Homo sapien
ttggattgagtttcaatgtattcctgcatcttg

SEQ ID NO: 1067347 - DNA, 33 bp, Homo sapien
tgcaaaaatcacagaaatcctatacaccaataa

SEQ ID NO: 1067348 - DNA, 33 bp, Homo sapien
tgcaaaaatcacagaattcctatacaccaataa

SEQ ID NO: 1067349 - DNA, 33 bp, Homo sapien
atagaccctgtgaaaacggactagaattggcct

SEQ ID NO: 1067350 - DNA, 33 bp, Homo sapien
atagaccctgtgaaaatggactagaattggcct

SEQ ID NO: 1067351 - DNA, 33 bp, Homo sapien
ttgtgcttcttcaaaaatctattaaaaatccag

SEQ ID NO: 1067352 - DNA, 33 bp, Homo sapien
ttgtgcttcttcaaaagtctattaaaaatccag

SEQ ID NO: 1067353 - DNA, 33 bp, Homo sapien
actcaggatattgagaagtgcaatagagaatgt

SEQ ID NO: 1067354 - DNA, 33 bp, Homo sapien
actcaggatattgagaggtgcaatagagaatgt

SEQ ID NO: 1067355 - DNA, 33 bp, Homo sapien
acactggaagctgttcgctagcattcagttatt

SEQ ID NO: 1067356 - DNA, 33 bp, Homo sapien
acactggaagctgttctctagcattcagttatt

SEQ ID NO: 1067357 - DNA, 33 bp, Homo sapien
aaaatcaaggtatcaacagagtttgttcctttg

SEQ ID NO: 1067358 - DNA, 33 bp, Homo sapien
aaaatcaaggtatcaatagagtttgttcctttg

SEQ ID NO: 1067359 - DNA, 33 bp, Homo sapien
atggaaaagtaaaggcaactatttcctgcacct

SEQ ID NO: 1067360 - DNA, 33 bp, Homo sapien
atggaaaagtaaaggcgactatttcctgcacct

SEQ ID NO: 1067361 - DNA, 33 bp, Homo sapien
cagaagagtttcactcaatgaccactgccaagt

SEQ ID NO: 1067362 - DNA, 33 bp, Homo sapien
cagaagagtttcactccatgaccactgccaagt

SEQ ID NO: 1067363 - DNA, 33 bp, Homo sapien
gaaatacttcatacacccttaggaggttgcagg

SEQ ID NO: 1067364 - DNA, 33 bp, Homo sapien
gaaatacttcatacactcttaggaggttgcagg

SEQ ID NO: 1067365 - DNA, 33 bp, Homo sapien
tgccagcttaatcgcaatacaataaaatatcag

SEQ ID NO: 1067366 - DNA, 33 bp, Homo sapien
tgccagcttaatcgcagtacaataaaatatcag

SEQ ID NO: 1067367 - DNA, 33 bp, Homo sapien
atgctacaacctatcacgctttcaacgaaatcc

SEQ ID NO: 1067368 - DNA, 33 bp, Homo sapien
atgctacaacctatcatgctttcaacgaaatcc

SEQ ID NO: 1067369 - DNA, 33 bp, Homo sapien
tctctgattatgatgcaccaaatttcttattca

SEQ ID NO: 1067370 - DNA, 33 bp, Homo sapien
tctctgattatgatgcgccaaatttcttattca

SEQ ID NO: 1067371 - DNA, 33 bp, Homo sapien
aatgctggagatagtcaataaggcagtctttgt

SEQ ID NO: 1067372 - DNA, 33 bp, Homo sapien
aatgctggagatagtcgataaggcagtctttgt

SEQ ID NO: 1067373 - DNA, 33 bp, Homo sapien
gacaaggacattattggagagtgaacactgttt

SEQ ID NO: 1067374 - DNA, 33 bp, Homo sapien
gacaaggacattattgtagagtgaacactgttt

SEQ ID NO: 1067375 - DNA, 33 bp, Homo sapien
ggactggctagcttaacagtcatctattcttaa

SEQ ID NO: 1067376 - DNA, 33 bp, Homo sapien
ggactggctagcttaatagtcatctattcttaa

SEQ ID NO: 1067377 - DNA, 33 bp, Homo sapien
actgaacacaaaacaactaggttacaagttcaa

SEQ ID NO: 1067378 - DNA, 33 bp, Homo sapien
actgaacacaaaacaattaggttacaagttcaa

SEQ ID NO: 1067379 - DNA, 33 bp, Homo sapien
ataccttcaggagctgaaaaatctgaggagatt

SEQ ID NO: 1067380 - DNA, 33 bp, Homo sapien
ataccttcaggagctggaaaatctgaggagatt

SEQ ID NO: 1067381 - DNA, 33 bp, Homo sapien
atcaaactgatacaaaagagcaactttcagggc

SEQ ID NO: 1067382 - DNA, 33 bp, Homo sapien
atcaaactgatacaaaggagcaactttcagggc

SEQ ID NO: 1067383 - DNA, 33 bp, Homo sapien
actagaatactagaaaacacctcttttgacagc

SEQ ID NO: 1067384 - DNA, 33 bp, Homo sapien
actagaatactagaaagcacctcttttgacagc

SEQ ID NO: 1067385 - DNA, 33 bp, Homo sapien
gtacctgaggaaataaataacattaaacagatt

SEQ ID NO: 1067386 - DNA, 33 bp, Homo sapien
gtacctgaggaaataagtaacattaaacagatt

SEQ ID NO: 1067387 - DNA, 33 bp, Homo sapien
aaataatgaaattttccattaggtaggccatgt

SEQ ID NO: 1067388 - DNA, 33 bp, Homo sapien
aaataatgaaattttctattaggtaggccatgt

SEQ ID NO: 1067389 - DNA, 33 bp, Homo sapien
gtgtaagtttaatggccgagctctaacaaacct

SEQ ID NO: 1067390 - DNA, 33 bp, Homo sapien
gtgtaagtttaatggctgagctctaacaaacct

SEQ ID NO: 1067391 - DNA, 33 bp, Homo sapien
gttttgttggctttctaaaaatatgccagtata

SEQ ID NO: 1067392 - DNA, 33 bp, Homo sapien
gttttgttggctttctgaaaatatgccagtata

SEQ ID NO: 1067393 - DNA, 33 bp, Homo sapien
ttagtttcttgaagaaattccagactgttcttc

SEQ ID NO: 1067394 - DNA, 33 bp, Homo sapien
ttagtttcttgaagaacttccagactgttcttc

SEQ ID NO: 1067395 - DNA, 33 bp, Homo sapien
gcctgtaaaatcaaaagccagttagttacttcc

SEQ ID NO: 1067396 - DNA, 33 bp, Homo sapien
gcctgtaaaatcaaaatccagttagttacttcc

SEQ ID NO: 1067397 - DNA, 33 bp, Homo sapien
agttaaatagatcaagaccagcacagcatgtga

SEQ ID NO: 1067398 - DNA, 33 bp, Homo sapien
agttaaatagatcaagtccagcacagcatgtga

SEQ ID NO: 1067399 - DNA, 33 bp, Homo sapien
tcacaaattgcaaatgaagaaatcaatgggaaa

SEQ ID NO: 1067400 - DNA, 33 bp, Homo sapien
tcacaaattgcaaatggagaaatcaatgggaaa

SEQ ID NO: 1067401 - DNA, 33 bp, Homo sapien
tttgaggaagacaggaaatatttgagggctggt

SEQ ID NO: 1067402 - DNA, 33 bp, Homo sapien
tttgaggaagacaggagatatttgagggctggt

SEQ ID NO: 1067403 - DNA, 33 bp, Homo sapien
gaatacattgtatccacgaatatttttgtaact

SEQ ID NO: 1067404 - DNA, 33 bp, Homo sapien
gaatacattgtatccaggaatatttttgtaact

SEQ ID NO: 1067405 - DNA, 33 bp, Homo sapien
ctgtctatgtccgacaatcaacaaaatccaaag

SEQ ID NO: 1067406 - DNA, 33 bp, Homo sapien
ctgtctatgtccgacattcaacaaaatccaaag

SEQ ID NO: 1067407 - DNA, 33 bp, Homo sapien
cacatacactagtgcacattctgctgccactgc

SEQ ID NO: 1067408 - DNA, 33 bp, Homo sapien
cacatacactagtgcatattctgctgccactgc

SEQ ID NO: 1067409 - DNA, 33 bp, Homo sapien
gggtttgagtatggtacaagtttagttcaactg

SEQ ID NO: 1067410 - DNA, 33 bp, Homo sapien
gggtttgagtatggtataagtttagttcaactg

SEQ ID NO: 1067411 - DNA, 33 bp, Homo sapien
tacctaaattatcacaaaggttccaacaaatga

SEQ ID NO: 1067412 - DNA, 33 bp, Homo sapien
tacctaaattatcacagaggttccaacaaatga

SEQ ID NO: 1067413 - DNA, 33 bp, Homo sapien
caaaagacctaggttccagcccaaactctgtca

SEQ ID NO: 1067414 - DNA, 33 bp, Homo sapien
caaaagacctaggttctagcccaaactctgtca

SEQ ID NO: 1067415 - DNA, 33 bp, Homo sapien
tggatgctggacaaaaccttttgaatgaagggg

SEQ ID NO: 1067416 - DNA, 33 bp, Homo sapien
tggatgctggacaaaatcttttgaatgaagggg

SEQ ID NO: 1067417 - DNA, 33 bp, Homo sapien
ggtttattctacatacacaaacaggcacagaca

SEQ ID NO: 1067418 - DNA, 33 bp, Homo sapien
ggtttattctacatacgcaaacaggcacagaca

SEQ ID NO: 1067419 - DNA, 33 bp, Homo sapien
attcaactgggaccaccgggataatccaggtaa

SEQ ID NO: 1067420 - DNA, 33 bp, Homo sapien
attcaactgggaccactgggataatccaggtaa

SEQ ID NO: 1067421 - DNA, 33 bp, Homo sapien
tcattgtgaggacataccatctgaccaccaagt

SEQ ID NO: 1067422 - DNA, 33 bp, Homo sapien
tcattgtgaggacatagcatctgaccaccaagt

SEQ ID NO: 1067423 - DNA, 33 bp, Homo sapien
atcatgccttaattcaatctattttctgcactg

SEQ ID NO: 1067424 - DNA, 33 bp, Homo sapien
atcatgccttaattcagtctattttctgcactg

SEQ ID NO: 1067425 - DNA, 33 bp, Homo sapien
caccaactgagcaatgcaggcattcaaaggccc

SEQ ID NO: 1067426 - DNA, 33 bp, Homo sapien
caccaactgagcaatgtaggcattcaaaggccc

SEQ ID NO: 1067427 - DNA, 33 bp, Homo sapien
tcagagttgtctaaaactgaggtatgggtcaga

SEQ ID NO: 1067428 - DNA, 33 bp, Homo sapien
tcagagttgtctaaaattgaggtatgggtcaga

SEQ ID NO: 1067429 - DNA, 33 bp, Homo sapien
tgtttttagcaagcatcaaatctaccctctcat

SEQ ID NO: 1067430 - DNA, 33 bp, Homo sapien
tgtttttagcaagcattaaatctaccctctcat

SEQ ID NO: 1067431 - DNA, 33 bp, Homo sapien
ttggcatggaagccataaagaattttatatcta

SEQ ID NO: 1067432 - DNA, 33 bp, Homo sapien
ttggcatggaagccattaagaattttatatcta

SEQ ID NO: 1067433 - DNA, 33 bp, Homo sapien
ctttcaataagctcaaaaaggcccaagtcatat

SEQ ID NO: 1067434 - DNA, 33 bp, Homo sapien
ctttcaataagctcaataaggcccaagtcatat

SEQ ID NO: 1067435 - DNA, 33 bp, Homo sapien
gagctctgagttagtgcagctgaagtggccacc

SEQ ID NO: 1067436 - DNA, 33 bp, Homo sapien
gagctctgagttagtgtagctgaagtggccacc

SEQ ID NO: 1067437 - DNA, 33 bp, Homo sapien
acattcttgcaaaaaaaggatgcttttcacaca

SEQ ID NO: 1067438 - DNA, 33 bp, Homo sapien
acattcttgcaaaaaagggatgcttttcacaca

SEQ ID NO: 1067439 - DNA, 33 bp, Homo sapien
ctcctgtctgctaaaaatagtttcacgtggaat

SEQ ID NO: 1067440 - DNA, 33 bp, Homo sapien
ctcctgtctgctaaaagtagtttcacgtggaat

SEQ ID NO: 1067441 - DNA, 33 bp, Homo sapien
gaaaagtctgaaaacacgtaggaatgggagcct

SEQ ID NO: 1067442 - DNA, 33 bp, Homo sapien
gaaaagtctgaaaacatgtaggaatgggagcct

SEQ ID NO: 1067443 - DNA, 33 bp, Homo sapien
tgcattgggtatgcaccagtgtagagtgctggc

SEQ ID NO: 1067444 - DNA, 33 bp, Homo sapien
tgcattgggtatgcactagtgtagagtgctggc

SEQ ID NO: 1067445 - DNA, 33 bp, Homo sapien
tgattgtacacatgccaatcaattagcatttca

SEQ ID NO: 1067446 - DNA, 33 bp, Homo sapien
tgattgtacacatgccgatcaattagcatttca

SEQ ID NO: 1067447 - DNA, 33 bp, Homo sapien
tctggtggaaatgaagccaactctgcaagtgtt

SEQ ID NO: 1067448 - DNA, 33 bp, Homo sapien
tctggtggaaatgaaggcaactctgcaagtgtt

SEQ ID NO: 1067449 - DNA, 33 bp, Homo sapien
atatctagataaaaaaagtcataaaacatcaag

SEQ ID NO: 1067450 - DNA, 33 bp, Homo sapien
atatctagataaaaaacgtcataaaacatcaag

SEQ ID NO: 1067451 - DNA, 33 bp, Homo sapien
tttcttcctacaaatgcagagcagtttgcacat

SEQ ID NO: 1067452 - DNA, 33 bp, Homo sapien
tttcttcctacaaatgtagagcagtttgcacat

SEQ ID NO: 1067453 - DNA, 33 bp, Homo sapien
tgatgccacttctttgcaatagttgatgttgtg

SEQ ID NO: 1067454 - DNA, 33 bp, Homo sapien
tgatgccacttctttgtaatagttgatgttgtg

SEQ ID NO: 1067455 - DNA, 33 bp, Homo sapien
agtaaagtttctgatgcatttcctacaggggac

SEQ ID NO: 1067456 - DNA, 33 bp, Homo sapien
agtaaagtttctgatggatttcctacaggggac

SEQ ID NO: 1067457 - DNA, 33 bp, Homo sapien
gaggtatctagtggaacgtggtttttattctag

SEQ ID NO: 1067458 - DNA, 33 bp, Homo sapien
gaggtatctagtggaatgtggtttttattctag

SEQ ID NO: 1067459 - DNA, 33 bp, Homo sapien
aggcagcaagtagtcaagaagccaatgttggtt

SEQ ID NO: 1067460 - DNA, 33 bp, Homo sapien
aggcagcaagtagtcaggaagccaatgttggtt

SEQ ID NO: 1067461 - DNA, 33 bp, Homo sapien
cattatttgcatataaacaatgtacacattccc

SEQ ID NO: 1067462 - DNA, 33 bp, Homo sapien
cattatttgcatataaccaatgtacacattccc

SEQ ID NO: 1067463 - DNA, 33 bp, Homo sapien
atgtaatgttgaatgaacttattttcccaagca

SEQ ID NO: 1067464 - DNA, 33 bp, Homo sapien
atgtaatgttgaatgagcttattttcccaagca

SEQ ID NO: 1067465 - DNA, 33 bp, Homo sapien
tcaaaggagggcctaccgccaagctaagatcca

SEQ ID NO: 1067466 - DNA, 33 bp, Homo sapien
tcaaaggagggcctactgccaagctaagatcca

SEQ ID NO: 1067467 - DNA, 33 bp, Homo sapien
gtgttcatcttgcctacgctgatttaattaact

SEQ ID NO: 1067468 - DNA, 33 bp, Homo sapien
gtgttcatcttgcctatgctgatttaattaact

SEQ ID NO: 1067469 - DNA, 33 bp, Homo sapien
tcaagctattacctcaaaaacacttgatgatcg

SEQ ID NO: 1067470 - DNA, 33 bp, Homo sapien
tcaagctattacctcagaaacacttgatgatcg

SEQ ID NO: 1067471 - DNA, 33 bp, Homo sapien
gcctatcctgaaataaccagctctaaatggtcc

SEQ ID NO: 1067472 - DNA, 33 bp, Homo sapien
gcctatcctgaaataagcagctctaaatggtcc

SEQ ID NO: 1067473 - DNA, 33 bp, Homo sapien
aactgtttttacctcaatgagagcccatttgtt

SEQ ID NO: 1067474 - DNA, 33 bp, Homo sapien
aactgtttttacctcagtgagagcccatttgtt

SEQ ID NO: 1067475 - DNA, 33 bp, Homo sapien
ctcactcacatatgaaatctaaatttatcacac

SEQ ID NO: 1067476 - DNA, 33 bp, Homo sapien
ctcactcacatatgaattctaaatttatcacac

SEQ ID NO: 1067477 - DNA, 33 bp, Homo sapien
aagggcactccacccaacagaccatacagcaac

SEQ ID NO: 1067478 - DNA, 33 bp, Homo sapien
aagggcactccacccagcagaccatacagcaac

SEQ ID NO: 1067479 - DNA, 33 bp, Homo sapien
aacttcaagatcaccaaagttgctgtatggtct

SEQ ID NO: 1067480 - DNA, 33 bp, Homo sapien
aacttcaagatcaccacagttgctgtatggtct

SEQ ID NO: 1067481 - DNA, 33 bp, Homo sapien
tgagcatattataacaaaggcctcagaggtagg

SEQ ID NO: 1067482 - DNA, 33 bp, Homo sapien
tgagcatattataacataggcctcagaggtagg

SEQ ID NO: 1067483 - DNA, 33 bp, Homo sapien
acaggaaagtattcaaaagatgggccaggtgaa

SEQ ID NO: 1067484 - DNA, 33 bp, Homo sapien
acaggaaagtattcaagagatgggccaggtgaa

SEQ ID NO: 1067485 - DNA, 33 bp, Homo sapien
gcatggaaaacagctaccgttagacctggaaca

SEQ ID NO: 1067486 - DNA, 33 bp, Homo sapien
gcatggaaaacagctatcgttagacctggaaca

SEQ ID NO: 1067487 - DNA, 33 bp, Homo sapien
ttctgagaaaatattgaagaccatctttatgcc

SEQ ID NO: 1067488 - DNA, 33 bp, Homo sapien
ttctgagaaaatattggagaccatctttatgcc

SEQ ID NO: 1067489 - DNA, 33 bp, Homo sapien
acaaaaacaagcctacaataaaaaatgccagtg

SEQ ID NO: 1067490 - DNA, 33 bp, Homo sapien
acaaaaacaagcctaccataaaaaatgccagtg

SEQ ID NO: 1067491 - DNA, 33 bp, Homo sapien
aggttggctcttgttccattaacactgatgctc

SEQ ID NO: 1067492 - DNA, 33 bp, Homo sapien
aggttggctcttgttctattaacactgatgctc

SEQ ID NO: 1067493 - DNA, 33 bp, Homo sapien
aaatttactagaaaccaaacaatgattgccact

SEQ ID NO: 1067494 - DNA, 33 bp, Homo sapien
aaatttactagaaaccgaacaatgattgccact

SEQ ID NO: 1067495 - DNA, 33 bp, Homo sapien
cgtgctaaaaagagtaaaccagctacagcactg

SEQ ID NO: 1067496 - DNA, 33 bp, Homo sapien
cgtgctaaaaagagtacaccagctacagcactg

SEQ ID NO: 1067497 - DNA, 33 bp, Homo sapien
gtgggaaaaatctaaacgctccatggtctcttt

SEQ ID NO: 1067498 - DNA, 33 bp, Homo sapien
gtgggaaaaatctaaaggctccatggtctcttt

SEQ ID NO: 1067499 - DNA, 33 bp, Homo sapien
cttaaagatgtccttacggtaatgttatttgcc

SEQ ID NO: 1067500 - DNA, 33 bp, Homo sapien
cttaaagatgtccttatggtaatgttatttgcc

SEQ ID NO: 1067501 - DNA, 33 bp, Homo sapien
aagactatgcaggtaaaaacacctcacccagac

SEQ ID NO: 1067502 - DNA, 33 bp, Homo sapien
aagactatgcaggtaacaacacctcacccagac

SEQ ID NO: 1067503 - DNA, 33 bp, Homo sapien
atgatattccatcccacagcattttatttattt

SEQ ID NO: 1067504 - DNA, 33 bp, Homo sapien
atgatattccatcccatagcattttatttattt

SEQ ID NO: 1067505 - DNA, 33 bp, Homo sapien
tttgtttgcatttcaccgtaccacatcagtcca

SEQ ID NO: 1067506 - DNA, 33 bp, Homo sapien
tttgtttgcatttcactgtaccacatcagtcca

SEQ ID NO: 1067507 - DNA, 33 bp, Homo sapien
ggaataaactgagaatcagaagacctaaggacc

SEQ ID NO: 1067508 - DNA, 33 bp, Homo sapien
ggaataaactgagaatgagaagacctaaggacc

SEQ ID NO: 1067509 - DNA, 33 bp, Homo sapien
aaaagaaaattagcacagctccaatatggggat

SEQ ID NO: 1067510 - DNA, 33 bp, Homo sapien
aaaagaaaattagcacggctccaatatggggat

SEQ ID NO: 1067511 - DNA, 33 bp, Homo sapien
tcttgcaatatcgttaaacagatgatatgtata

SEQ ID NO: 1067512 - DNA, 33 bp, Homo sapien
tcttgcaatatcgttagacagatgatatgtata

SEQ ID NO: 1067513 - DNA, 33 bp, Homo sapien
ttgattttatcctacccactagctgtgagatca

SEQ ID NO: 1067514 - DNA, 33 bp, Homo sapien
ttgattttatcctacctactagctgtgagatca

SEQ ID NO: 1067515 - DNA, 33 bp, Homo sapien
tatatagaatcttagaactcatgaaatgtaatt

SEQ ID NO: 1067516 - DNA, 33 bp, Homo sapien
tatatagaatcttagagctcatgaaatgtaatt

SEQ ID NO: 1067517 - DNA, 33 bp, Homo sapien
aagtctgcatctaggaagcataatttttactgg

SEQ ID NO: 1067518 - DNA, 33 bp, Homo sapien
aagtctgcatctaggaggcataatttttactgg

SEQ ID NO: 1067519 - DNA, 33 bp, Homo sapien
aaacagacacaaataacgtttattccactgttg

SEQ ID NO: 1067520 - DNA, 33 bp, Homo sapien
aaacagacacaaataaggtttattccactgttg

SEQ ID NO: 1067521 - DNA, 33 bp, Homo sapien
cttgtatcccattgtaccatgtatcaaccttca

SEQ ID NO: 1067522 - DNA, 33 bp, Homo sapien
cttgtatcccattgtatcatgtatcaaccttca

SEQ ID NO: 1067523 - DNA, 33 bp, Homo sapien
gtgattttcattggtacagagagtgctgaattc

SEQ ID NO: 1067524 - DNA, 33 bp, Homo sapien
gtgattttcattggtagagagagtgctgaattc

SEQ ID NO: 1067525 - DNA, 33 bp, Homo sapien
tgaattcaataacacaatggtgatcattttaaa

SEQ ID NO: 1067526 - DNA, 33 bp, Homo sapien
tgaattcaataacacagtggtgatcattttaaa

SEQ ID NO: 1067527 - DNA, 33 bp, Homo sapien
aagttacattccataacgcttgcaaggctctgt

SEQ ID NO: 1067528 - DNA, 33 bp, Homo sapien
aagttacattccataatgcttgcaaggctctgt

SEQ ID NO: 1067529 - DNA, 33 bp, Homo sapien
ttagtgatatttgaggaaattggaattactaga

SEQ ID NO: 1067530 - DNA, 33 bp, Homo sapien
ttagtgatatttgagggaattggaattactaga

SEQ ID NO: 1067531 - DNA, 33 bp, Homo sapien
ccttctttctatagcaacacatcgcctctagtt

SEQ ID NO: 1067532 - DNA, 33 bp, Homo sapien
ccttctttctatagcagcacatcgcctctagtt

SEQ ID NO: 1067533 - DNA, 33 bp, Homo sapien
aagtgttggtataagcaaggagactccttatgc

SEQ ID NO: 1067534 - DNA, 33 bp, Homo sapien
aagtgttggtataagcgaggagactccttatgc

SEQ ID NO: 1067535 - DNA, 33 bp, Homo sapien
ttctgacatgcctgaacgagatgaatgtgaata

SEQ ID NO: 1067536 - DNA, 33 bp, Homo sapien
ttctgacatgcctgaatgagatgaatgtgaata

SEQ ID NO: 1067537 - DNA, 33 bp, Homo sapien
tcaaggtccaactcaaaatccgcctcttccatg

SEQ ID NO: 1067538 - DNA, 33 bp, Homo sapien
tcaaggtccaactcaagatccgcctcttccatg

SEQ ID NO: 1067539 - DNA, 33 bp, Homo sapien
ataggaaataagttaaactgtgaggctgaggta

SEQ ID NO: 1067540 - DNA, 33 bp, Homo sapien
ataggaaataagttaagctgtgaggctgaggta

SEQ ID NO: 1067541 - DNA, 33 bp, Homo sapien
taaggagttgatacttaaaaaaatttttctttt

SEQ ID NO: 1067542 - DNA, 33 bp, Homo sapien
taaggagttgatactttaaaaaatttttctttt

SEQ ID NO: 1067543 - DNA, 33 bp, Homo sapien
ggtgcagaggttacatgagtgagaatagggaga

SEQ ID NO: 1067544 - DNA, 33 bp, Homo sapien
ggtgcagaggttacattagtgagaatagggaga

SEQ ID NO: 1067545 - DNA, 33 bp, Homo sapien
tgcaagccttcatggaacaagtgacatttgata

SEQ ID NO: 1067546 - DNA, 33 bp, Homo sapien
tgcaagccttcatggagcaagtgacatttgata

SEQ ID NO: 1067547 - DNA, 33 bp, Homo sapien
ttattgagaggtagtacaatacatggtcacata

SEQ ID NO: 1067548 - DNA, 33 bp, Homo sapien
ttattgagaggtagtataatacatggtcacata

SEQ ID NO: 1067549 - DNA, 33 bp, Homo sapien
tctgtgagcatagacacaaaataaggttggctt

SEQ ID NO: 1067550 - DNA, 33 bp, Homo sapien
tctgtgagcatagacataaaataaggttggctt

SEQ ID NO: 1067551 - DNA, 33 bp, Homo sapien
tattccagccattacaaccatattcctgacagt

SEQ ID NO: 1067552 - DNA, 33 bp, Homo sapien
tattccagccattacatccatattcctgacagt

SEQ ID NO: 1067553 - DNA, 33 bp, Homo sapien
ggatggaaatgaggatgagaaggaatagtgatc

SEQ ID NO: 1067554 - DNA, 33 bp, Homo sapien
ggatggaaatgaggattagaaggaatagtgatc

SEQ ID NO: 1067555 - DNA, 33 bp, Homo sapien
tccacattatgtcctgcaactggatacagattg

SEQ ID NO: 1067556 - DNA, 33 bp, Homo sapien
tccacattatgtcctggaactggatacagattg

SEQ ID NO: 1067557 - DNA, 33 bp, Homo sapien
actgaagccatccaacaagtgatctgcagtgat

SEQ ID NO: 1067558 - DNA, 33 bp, Homo sapien
actgaagccatccaacgagtgatctgcagtgat

SEQ ID NO: 1067559 - DNA, 33 bp, Homo sapien
attgctagatgtgtaacggctggattaatggct

SEQ ID NO: 1067560 - DNA, 33 bp, Homo sapien
attgctagatgtgtaatggctggattaatggct

SEQ ID NO: 1067561 - DNA, 33 bp, Homo sapien
tatggcaaccgaatcaaagcctattggtatagg

SEQ ID NO: 1067562 - DNA, 33 bp, Homo sapien
tatggcaaccgaatcacagcctattggtatagg

SEQ ID NO: 1067563 - DNA, 33 bp, Homo sapien
ggggtggttccaagtaagtttggtagattctta

SEQ ID NO: 1067564 - DNA, 33 bp, Homo sapien
ggggtggttccaagtacgtttggtagattctta

SEQ ID NO: 1067565 - DNA, 33 bp, Homo sapien
aatcacaaggacttgaagactttaaagtagtat

SEQ ID NO: 1067566 - DNA, 33 bp, Homo sapien
aatcacaaggacttgaggactttaaagtagtat

SEQ ID NO: 1067567 - DNA, 33 bp, Homo sapien
acactatatgtgtctaagtgaatgagttgaaag

SEQ ID NO: 1067568 - DNA, 33 bp, Homo sapien
acactatatgtgtctaggtgaatgagttgaaag

SEQ ID NO: 1067569 - DNA, 33 bp, Homo sapien
taatcttccctacttccaattttcagttccaga

SEQ ID NO: 1067570 - DNA, 33 bp, Homo sapien
taatcttccctacttctaattttcagttccaga

SEQ ID NO: 1067571 - DNA, 33 bp, Homo sapien
tcggcattagtgctaacatatccttactggctc

SEQ ID NO: 1067572 - DNA, 33 bp, Homo sapien
tcggcattagtgctaagatatccttactggctc

SEQ ID NO: 1067573 - DNA, 33 bp, Homo sapien
gaagtcacattagatacgcagtggtccttctta

SEQ ID NO: 1067574 - DNA, 33 bp, Homo sapien
gaagtcacattagatatgcagtggtccttctta

SEQ ID NO: 1067575 - DNA, 33 bp, Homo sapien
ccaagatatatcaatacgctctctctttctgtc

SEQ ID NO: 1067576 - DNA, 33 bp, Homo sapien
ccaagatatatcaataggctctctctttctgtc

SEQ ID NO: 1067577 - DNA, 33 bp, Homo sapien
aattaagtttgattaacgttccatttctaatac

SEQ ID NO: 1067578 - DNA, 33 bp, Homo sapien
aattaagtttgattaaggttccatttctaatac

SEQ ID NO: 1067579 - DNA, 33 bp, Homo sapien
catatttatttctccaactgacatcatgatagg

SEQ ID NO: 1067580 - DNA, 33 bp, Homo sapien
catatttatttctccagctgacatcatgatagg

SEQ ID NO: 1067581 - DNA, 33 bp, Homo sapien
tttaatggagatgtatcagttcaattcagcaac

SEQ ID NO: 1067582 - DNA, 33 bp, Homo sapien
tttaatggagatgtattagttcaattcagcaac

SEQ ID NO: 1067583 - DNA, 33 bp, Homo sapien
tacctacctaatcaaaactctattggctttcaa

SEQ ID NO: 1067584 - DNA, 33 bp, Homo sapien
tacctacctaatcaaacctctattggctttcaa

SEQ ID NO: 1067585 - DNA, 33 bp, Homo sapien
tctacaagtactaccaaaaatttctcagggaaa

SEQ ID NO: 1067586 - DNA, 33 bp, Homo sapien
tctacaagtactaccacaaatttctcagggaaa

SEQ ID NO: 1067587 - DNA, 33 bp, Homo sapien
gacattttgcttcccaaggaaaaatcagtgggc

SEQ ID NO: 1067588 - DNA, 33 bp, Homo sapien
gacattttgcttcccatggaaaaatcagtgggc

SEQ ID NO: 1067589 - DNA, 33 bp, Homo sapien
tctgggtaaggacttaaaagaagataattatga

SEQ ID NO: 1067590 - DNA, 33 bp, Homo sapien
tctgggtaaggacttagaagaagataattatga

SEQ ID NO: 1067591 - DNA, 33 bp, Homo sapien
aaaagacttgataacactaattttaccacagcc

SEQ ID NO: 1067592 - DNA, 33 bp, Homo sapien
aaaagacttgataacattaattttaccacagcc

SEQ ID NO: 1067593 - DNA, 33 bp, Homo sapien
ttccaggtgctgtggaaatattacagtagttcc

SEQ ID NO: 1067594 - DNA, 33 bp, Homo sapien
ttccaggtgctgtggagatattacagtagttcc

SEQ ID NO: 1067595 - DNA, 33 bp, Homo sapien
aaaatgattaaggaaaaagtcatggaaaatgaa

SEQ ID NO: 1067596 - DNA, 33 bp, Homo sapien
aaaatgattaaggaaagagtcatggaaaatgaa

SEQ ID NO: 1067597 - DNA, 33 bp, Homo sapien
agcagttaaaattatcactgctacattagtcag

SEQ ID NO: 1067598 - DNA, 33 bp, Homo sapien
agcagttaaaattatctctgctacattagtcag

SEQ ID NO: 1067599 - DNA, 33 bp, Homo sapien
accctgatgataaaaacgcaccctttcggcaac

SEQ ID NO: 1067600 - DNA, 33 bp, Homo sapien
accctgatgataaaaatgcaccctttcggcaac

SEQ ID NO: 1067601 - DNA, 33 bp, Homo sapien
agaaaatatcctctaccggaaagacacagcttt

SEQ ID NO: 1067602 - DNA, 33 bp, Homo sapien
agaaaatatcctctactggaaagacacagcttt

SEQ ID NO: 1067603 - DNA, 33 bp, Homo sapien
tataatgctcgcatcgaattcttagtgtccttt

SEQ ID NO: 1067604 - DNA, 33 bp, Homo sapien
tataatgctcgcatcgtattcttagtgtccttt

SEQ ID NO: 1067605 - DNA, 33 bp, Homo sapien
aacatctgtaccagcacggtccaatggaaatat

SEQ ID NO: 1067606 - DNA, 33 bp, Homo sapien
aacatctgtaccagcatggtccaatggaaatat

SEQ ID NO: 1067607 - DNA, 33 bp, Homo sapien
taaacagctactaggcaactcttccaggctgat

SEQ ID NO: 1067608 - DNA, 33 bp, Homo sapien
taaacagctactaggcgactcttccaggctgat

SEQ ID NO: 1067609 - DNA, 33 bp, Homo sapien
tctactggagctattaaacgaaatctggctgat

SEQ ID NO: 1067610 - DNA, 33 bp, Homo sapien
tctactggagctattatacgaaatctggctgat

SEQ ID NO: 1067611 - DNA, 33 bp, Homo sapien
tccgtttcagcgcttccctaaatgcaaacataa

SEQ ID NO: 1067612 - DNA, 33 bp, Homo sapien
tccgtttcagcgcttctctaaatgcaaacataa

SEQ ID NO: 1067613 - DNA, 33 bp, Homo sapien
ttttccaagttttctacgtcctacttaagatgt

SEQ ID NO: 1067614 - DNA, 33 bp, Homo sapien
ttttccaagttttctatgtcctacttaagatgt

SEQ ID NO: 1067615 - DNA, 33 bp, Homo sapien
tcaaaccttgcaacaaccctctgaggtcagtac

SEQ ID NO: 1067616 - DNA, 33 bp, Homo sapien
tcaaaccttgcaacaagcctctgaggtcagtac

SEQ ID NO: 1067617 - DNA, 33 bp, Homo sapien
atacaaaaactacacaaggaggtgaattgatga

SEQ ID NO: 1067618 - DNA, 33 bp, Homo sapien
atacaaaaactacacacggaggtgaattgatga

SEQ ID NO: 1067619 - DNA, 33 bp, Homo sapien
aatagagggactcacacattttagtgtgcaaac

SEQ ID NO: 1067620 - DNA, 33 bp, Homo sapien
aatagagggactcacatattttagtgtgcaaac

SEQ ID NO: 1067621 - DNA, 33 bp, Homo sapien
tcatgtgcatggtactaaactgggaatgggatc

SEQ ID NO: 1067622 - DNA, 33 bp, Homo sapien
tcatgtgcatggtactgaactgggaatgggatc

SEQ ID NO: 1067623 - DNA, 33 bp, Homo sapien
atgttccaggacagtcaaaatttggtttcgttt

SEQ ID NO: 1067624 - DNA, 33 bp, Homo sapien
atgttccaggacagtcgaaatttggtttcgttt

SEQ ID NO: 1067625 - DNA, 33 bp, Homo sapien
catctcatgctagttaaaatggcggtcattaaa

SEQ ID NO: 1067626 - DNA, 33 bp, Homo sapien
catctcatgctagttagaatggcggtcattaaa

SEQ ID NO: 1067627 - DNA, 33 bp, Homo sapien
cagacagcagagtggcaacattaggaagaaaat

SEQ ID NO: 1067628 - DNA, 33 bp, Homo sapien
cagacagcagagtggcgacattaggaagaaaat

SEQ ID NO: 1067629 - DNA, 33 bp, Homo sapien
atcatattttgggctaaaaattgctggctactt

SEQ ID NO: 1067630 - DNA, 33 bp, Homo sapien
atcatattttgggctacaaattgctggctactt

SEQ ID NO: 1067631 - DNA, 33 bp, Homo sapien
ggggtgagcaggagaaaaactctaatttagcaa

SEQ ID NO: 1067632 - DNA, 33 bp, Homo sapien
ggggtgagcaggagaagaactctaatttagcaa

SEQ ID NO: 1067633 - DNA, 33 bp, Homo sapien
aagacttaaagaaaacggatgctttgacccaga

SEQ ID NO: 1067634 - DNA, 33 bp, Homo sapien
aagacttaaagaaaactgatgctttgacccaga

SEQ ID NO: 1067635 - DNA, 33 bp, Homo sapien
caaatgctgtatttctaaaactagacaatggga

SEQ ID NO: 1067636 - DNA, 33 bp, Homo sapien
caaatgctgtatttctgaaactagacaatggga

SEQ ID NO: 1067637 - DNA, 33 bp, Homo sapien
tacaatgcctggaactaacaaataatgatttca

SEQ ID NO: 1067638 - DNA, 33 bp, Homo sapien
tacaatgcctggaacttacaaataatgatttca

SEQ ID NO: 1067639 - DNA, 33 bp, Homo sapien
cttgaactttatatgaacttcctacccttaaaa

SEQ ID NO: 1067640 - DNA, 33 bp, Homo sapien
cttgaactttatatgagcttcctacccttaaaa

SEQ ID NO: 1067641 - DNA, 33 bp, Homo sapien
tttttattttcacaaactgagaaaacaataaat

SEQ ID NO: 1067642 - DNA, 33 bp, Homo sapien
tttttattttcacaaattgagaaaacaataaat

SEQ ID NO: 1067643 - DNA, 33 bp, Homo sapien
cagcattgacctatatcacaatagaagaaaaat

SEQ ID NO: 1067644 - DNA, 33 bp, Homo sapien
cagcattgacctatattacaatagaagaaaaat

SEQ ID NO: 1067645 - DNA, 33 bp, Homo sapien
ctgtccaatgcctcatcaaaggtatagatgggg

SEQ ID NO: 1067646 - DNA, 33 bp, Homo sapien
ctgtccaatgcctcattaaaggtatagatgggg

SEQ ID NO: 1067647 - DNA, 33 bp, Homo sapien
caacagaagcggaaccgcaagagacaagggaac

SEQ ID NO: 1067648 - DNA, 33 bp, Homo sapien
caacagaagcggaacctcaagagacaagggaac

SEQ ID NO: 1067649 - DNA, 33 bp, Homo sapien
gaaggcccaggaaagaatatttgaggtgttggc

SEQ ID NO: 1067650 - DNA, 33 bp, Homo sapien
gaaggcccaggaaagactatttgaggtgttggc

SEQ ID NO: 1067651 - DNA, 33 bp, Homo sapien
ctgatgacttgggtgcaagactaccagtggcct

SEQ ID NO: 1067652 - DNA, 33 bp, Homo sapien
ctgatgacttgggtgcgagactaccagtggcct

SEQ ID NO: 1067653 - DNA, 33 bp, Homo sapien
agggtcttggtcgcaccgtgcctcaactttttc

SEQ ID NO: 1067654 - DNA, 33 bp, Homo sapien
agggtcttggtcgcactgtgcctcaactttttc

SEQ ID NO: 1067655 - DNA, 33 bp, Homo sapien
gccttgtggaaacaaagaattcctattgcactg

SEQ ID NO: 1067656 - DNA, 33 bp, Homo sapien
gccttgtggaaacaaataattcctattgcactg

SEQ ID NO: 1067657 - DNA, 33 bp, Homo sapien
attaatatccagagagaaaaacagcaaaataag

SEQ ID NO: 1067658 - DNA, 33 bp, Homo sapien
attaatatccagagaggaaaacagcaaaataag

SEQ ID NO: 1067659 - DNA, 33 bp, Homo sapien
ttattctctttcaaaaactcagagactaggacc

SEQ ID NO: 1067660 - DNA, 33 bp, Homo sapien
ttattctctttcaaaagctcagagactaggacc

SEQ ID NO: 1067661 - DNA, 33 bp, Homo sapien
acccacacagactcaccaagtcataatgagttg

SEQ ID NO: 1067662 - DNA, 33 bp, Homo sapien
acccacacagactcacgaagtcataatgagttg

SEQ ID NO: 1067663 - DNA, 33 bp, Homo sapien
aaacagctatagaaaaaaagcagctgacctaag

SEQ ID NO: 1067664 - DNA, 33 bp, Homo sapien
aaacagctatagaaaacaagcagctgacctaag

SEQ ID NO: 1067665 - DNA, 33 bp, Homo sapien
atgtgactgtaccaaaaattgttcaaccattca

SEQ ID NO: 1067666 - DNA, 33 bp, Homo sapien
atgtgactgtaccaaacattgttcaaccattca

SEQ ID NO: 1067667 - DNA, 33 bp, Homo sapien
cagcatcctagcactgaattgagatactccatg

SEQ ID NO: 1067668 - DNA, 33 bp, Homo sapien
cagcatcctagcactggattgagatactccatg

SEQ ID NO: 1067669 - DNA, 33 bp, Homo sapien
gaattaatgtatctcacaacgagctttagaaag

SEQ ID NO: 1067670 - DNA, 33 bp, Homo sapien
gaattaatgtatctcataacgagctttagaaag

SEQ ID NO: 1067671 - DNA, 33 bp, Homo sapien
ttttttagataagggaactcactgttgcccagg

SEQ ID NO: 1067672 - DNA, 33 bp, Homo sapien
ttttttagataagggacctcactgttgcccagg

SEQ ID NO: 1067673 - DNA, 33 bp, Homo sapien
agtggagattataatagcatctagctaaaatgt

SEQ ID NO: 1067674 - DNA, 33 bp, Homo sapien
agtggagattataatatcatctagctaaaatgt

SEQ ID NO: 1067675 - DNA, 33 bp, Homo sapien
ttaagttttagtttcacaatccttctgggcctc

SEQ ID NO: 1067676 - DNA, 33 bp, Homo sapien
ttaagttttagtttcataatccttctgggcctc

SEQ ID NO: 1067677 - DNA, 33 bp, Homo sapien
tgactcctggcctacaataagagaagcagttac

SEQ ID NO: 1067678 - DNA, 33 bp, Homo sapien
tgactcctggcctacattaagagaagcagttac

SEQ ID NO: 1067679 - DNA, 33 bp, Homo sapien
acatcttccaaatatcaaaaagcatccaaaatt

SEQ ID NO: 1067680 - DNA, 33 bp, Homo sapien
acatcttccaaatatcgaaaagcatccaaaatt

SEQ ID NO: 1067681 - DNA, 33 bp, Homo sapien
ttgttatggctatagaactgcaaaataggacac

SEQ ID NO: 1067682 - DNA, 33 bp, Homo sapien
ttgttatggctatagagctgcaaaataggacac

SEQ ID NO: 1067683 - DNA, 33 bp, Homo sapien
actacgctgacttttacggaaatctcttcctct

SEQ ID NO: 1067684 - DNA, 33 bp, Homo sapien
actacgctgacttttatggaaatctcttcctct

SEQ ID NO: 1067685 - DNA, 33 bp, Homo sapien
cctttttaaaagcccacgttagcacttccagtt

SEQ ID NO: 1067686 - DNA, 33 bp, Homo sapien
cctttttaaaagcccatgttagcacttccagtt

SEQ ID NO: 1067687 - DNA, 33 bp, Homo sapien
tggatgatgagaaagaaggtaagagaacatttt

SEQ ID NO: 1067688 - DNA, 33 bp, Homo sapien
tggatgatgagaaagatggtaagagaacatttt

SEQ ID NO: 1067689 - DNA, 33 bp, Homo sapien
ccagctagagacgtcactgaagaggctgcagtg

SEQ ID NO: 1067690 - DNA, 33 bp, Homo sapien
ccagctagagacgtcattgaagaggctgcagtg

SEQ ID NO: 1067691 - DNA, 33 bp, Homo sapien
tgatcaggggttggaaatcagagagtgttggag

SEQ ID NO: 1067692 - DNA, 33 bp, Homo sapien
tgatcaggggttggaagtcagagagtgttggag

SEQ ID NO: 1067693 - DNA, 33 bp, Homo sapien
agcagaaacaaaaagcaagaatcatggtttcca

SEQ ID NO: 1067694 - DNA, 33 bp, Homo sapien
agcagaaacaaaaagcgagaatcatggtttcca

SEQ ID NO: 1067695 - DNA, 33 bp, Homo sapien
aagacagagagaactccgaaaatttttaggttc

SEQ ID NO: 1067696 - DNA, 33 bp, Homo sapien
aagacagagagaactctgaaaatttttaggttc

SEQ ID NO: 1067697 - DNA, 33 bp, Homo sapien; identical to SEQ ID NO: 1067695

SEQ ID NO: 1067698 - DNA, 33 bp, Homo sapien; identical to SEQ ID NO: 1067696

SEQ ID NO: 1067699 - DNA, 33 bp, Homo sapien
atctatttttttaacaccaaattggctacatgt

SEQ ID NO: 1067700 - DNA, 33 bp, Homo sapien
atctatttttttaacatcaaattggctacatgt

SEQ ID NO: 1067701 - DNA, 33 bp, Homo sapien
gacagacagtattccaagttctgtgtatatgtt

SEQ ID NO: 1067702 - DNA, 33 bp, Homo sapien
gacagacagtattccaggttctgtgtatatgtt

SEQ ID NO: 1067703 - DNA, 33 bp, Homo sapien
ttgggactgtttttccacaaaggtttatcttga

SEQ ID NO: 1067704 - DNA, 33 bp, Homo sapien
ttgggactgtttttccgcaaaggtttatcttga

SEQ ID NO: 1067705 - DNA, 33 bp, Homo sapien
cctgtgtgacagaggcagaccttgtctcaaaac

SEQ ID NO: 1067706 - DNA, 33 bp, Homo sapien
cctgtgtgacagaggcggaccttgtctcaaaac

SEQ ID NO: 1067707 - DNA, 33 bp, Homo sapien
tattcatgtccagaaacggtgttaatcatgtac

SEQ ID NO: 1067708 - DNA, 33 bp, Homo sapien
tattcatgtccagaaatggtgttaatcatgtac

SEQ ID NO: 1067709 - DNA, 33 bp, Homo sapien
actgttgcacataaacagaatagaacaccaaag

SEQ ID NO: 1067710 - DNA, 33 bp, Homo sapien
actgttgcacataaactgaatagaacaccaaag

SEQ ID NO: 1067711 - DNA, 33 bp, Homo sapien
caggctgcccattaaacgctaaaagtaaaatag

SEQ ID NO: 1067712 - DNA, 33 bp, Homo sapien
caggctgcccattaaatgctaaaagtaaaatag

SEQ ID NO: 1067713 - DNA, 33 bp, Homo sapien
cagtctgtaagaagtgccaaaattaagggaaca

SEQ ID NO: 1067714 - DNA, 33 bp, Homo sapien
cagtctgtaagaagtgtcaaaattaagggaaca

SEQ ID NO: 1067715 - DNA, 33 bp, Homo sapien
aacacctctggtcttacaagattcagataaggg

SEQ ID NO: 1067716 - DNA, 33 bp, Homo sapien
aacacctctggtcttataagattcagataaggg

SEQ ID NO: 1067717 - DNA, 33 bp, Homo sapien
taaaaatatttgtcccactgagtgtgaattttc

SEQ ID NO: 1067718 - DNA, 33 bp, Homo sapien
taaaaatatttgtccctctgagtgtgaattttc

SEQ ID NO: 1067719 - DNA, 33 bp, Homo sapien
ttattcagcctattaacactactgctctaacaa

SEQ ID NO: 1067720 - DNA, 33 bp, Homo sapien
ttattcagcctattaatactactgctctaacaa

SEQ ID NO: 1067721 - DNA, 33 bp, Homo sapien
cagaggtttccagcagccccaacagaaagagaa

SEQ ID NO: 1067722 - DNA, 33 bp, Homo sapien
cagaggtttccagcaggcccaacagaaagagaa

SEQ ID NO: 1067723 - DNA, 33 bp, Homo sapien
aatggtagcagttacacgaatacattacgaatt

SEQ ID NO: 1067724 - DNA, 33 bp, Homo sapien
aatggtagcagttacatgaatacattacgaatt

SEQ ID NO: 1067725 - DNA, 33 bp, Homo sapien
ctgagaaatcctttcaaaactatctttgtgtat

SEQ ID NO: 1067726 - DNA, 33 bp, Homo sapien
ctgagaaatcctttcacaactatctttgtgtat

SEQ ID NO: 1067727 - DNA, 33 bp, Homo sapien
agacccaccccagatccattccttgcaatcttt

SEQ ID NO: 1067728 - DNA, 33 bp, Homo sapien
agacccaccccagatctattccttgcaatcttt

SEQ ID NO: 1067729 - DNA, 33 bp, Homo sapien
tcatctttctgccttaggggatgatggattatt

SEQ ID NO: 1067730 - DNA, 33 bp, Homo sapien
tcatctttctgccttatgggatgatggattatt

SEQ ID NO: 1067731 - DNA, 33 bp, Homo sapien
aatgaaaccacaatgacgcttgctgatagacac

SEQ ID NO: 1067732 - DNA, 33 bp, Homo sapien
aatgaaaccacaatgatgcttgctgatagacac

SEQ ID NO: 1067733 - DNA, 33 bp, Homo sapien
ccatggtgtgaatctgaactcccatggaaggtt

SEQ ID NO: 1067734 - DNA, 33 bp, Homo sapien
ccatggtgtgaatctggactcccatggaaggtt

SEQ ID NO: 1067735 - DNA, 33 bp, Homo sapien
gactggtgtcttagaacctcagaatgcaagagg

SEQ ID NO: 1067736 - DNA, 33 bp, Homo sapien
gactggtgtcttagaatctcagaatgcaagagg

SEQ ID NO: 1067737 - DNA, 33 bp, Homo sapien
cttctttgtgcctctaacttcatttgcattctt

SEQ ID NO: 1067738 - DNA, 33 bp, Homo sapien
cttctttgtgcctctagcttcatttgcattctt

SEQ ID NO: 1067739 - DNA, 33 bp, Homo sapien
tcccaaagaatcacaacctcactttgcaaaaat

SEQ ID NO: 1067740 - DNA, 33 bp, Homo sapien
tcccaaagaatcacaatctcactttgcaaaaat

SEQ ID NO: 1067741 - DNA, 33 bp, Homo sapien
cacatggatatgtaaagtgctaagagtccagat

SEQ ID NO: 1067742 - DNA, 33 bp, Homo sapien
cacatggatatgtaaattgctaagagtccagat

SEQ ID NO: 1067743 - DNA, 33 bp, Homo sapien
gggatgacttatcccacgacctggaattccact

SEQ ID NO: 1067744 - DNA, 33 bp, Homo sapien
gggatgacttatcccatgacctggaattccact

SEQ ID NO: 1067745 - DNA, 33 bp, Homo sapien
tgttaaagtcacgaagaatgatgaacaaacttc

SEQ ID NO: 1067746 - DNA, 33 bp, Homo sapien
tgttaaagtcacgaaggatgatgaacaaacttc

SEQ ID NO: 1067747 - DNA, 33 bp, Homo sapien
accccacaagctagataagcctgtaagtgaaaa

SEQ ID NO: 1067748 - DNA, 33 bp, Homo sapien
accccacaagctagatgagcctgtaagtgaaaa

SEQ ID NO: 1067749 - DNA, 33 bp, Homo sapien
caccagacactatcctgaatgacagtggtatgt

SEQ ID NO: 1067750 - DNA, 33 bp, Homo sapien
caccagacactatccttaatgacagtggtatgt

SEQ ID NO: 1067751 - DNA, 33 bp, Homo sapien
ggcagttacagccataagtattacctcccaggc

SEQ ID NO: 1067752 - DNA, 33 bp, Homo sapien
ggcagttacagccataggtattacctcccaggc

SEQ ID NO: 1067753 - DNA, 33 bp, Homo sapien
agttatcttgtttctcactcttatacttctgcg

SEQ ID NO: 1067754 - DNA, 33 bp, Homo sapien
agttatcttgtttctcgctcttatacttctgcg

SEQ ID NO: 1067755 - DNA, 33 bp, Homo sapien
catgtacgttagcctcagagaggatgaaacaaa

SEQ ID NO: 1067756 - DNA, 33 bp, Homo sapien
catgtacgttagcctcggagaggatgaaacaaa

SEQ ID NO: 1067757 - DNA, 33 bp, Homo sapien
tctgacttccagctcaacacttttttcatccca

SEQ ID NO: 1067758 - DNA, 33 bp, Homo sapien
tctgacttccagctcagcacttttttcatccca

SEQ ID NO: 1067759 - DNA, 33 bp, Homo sapien
gatatcagtgtatagactaaaagctcttctttt

SEQ ID NO: 1067760 - DNA, 33 bp, Homo sapien
gatatcagtgtatagagtaaaagctcttctttt

SEQ ID NO: 1067761 - DNA, 33 bp, Homo sapien
tccattggagagatgactattttccatttggca

SEQ ID NO: 1067762 - DNA, 33 bp, Homo sapien
tccattggagagatgattattttccatttggca

SEQ ID NO: 1067763 - DNA, 33 bp, Homo sapien
ctggatgcactcatgaaggttgttcttaaggag

SEQ ID NO: 1067764 - DNA, 33 bp, Homo sapien
ctggatgcactcatgacggttgttcttaaggag

SEQ ID NO: 1067765 - DNA, 33 bp, Homo sapien
gccttcatgagaggaaagaggaccatgatccca

SEQ ID NO: 1067766 - DNA, 33 bp, Homo sapien
gccttcatgagaggaacgaggaccatgatccca

SEQ ID NO: 1067767 - DNA, 33 bp, Homo sapien
tttctagagcgtcgtccctacaaaaaatccaaa

SEQ ID NO: 1067768 - DNA, 33 bp, Homo sapien
tttctagagcgtcgtctctacaaaaaatccaaa

SEQ ID NO: 1067769 - DNA, 33 bp, Homo sapien
gcaacatgactttatcaaccttctgtagcaata

SEQ ID NO: 1067770 - DNA, 33 bp, Homo sapien
gcaacatgactttatcgaccttctgtagcaata

SEQ ID NO: 1067771 - DNA, 33 bp, Homo sapien
tttttgtgtttgtagcaagaaatatggttcaaa

SEQ ID NO: 1067772 - DNA, 33 bp, Homo sapien
tttttgtgtttgtagcgagaaatatggttcaaa

SEQ ID NO: 1067773 - DNA, 33 bp, Homo sapien
atccctgcagagctgaccgtgagaagtaatttg

SEQ ID NO: 1067774 - DNA, 33 bp, Homo sapien
atccctgcagagctgagcgtgagaagtaatttg

SEQ ID NO: 1067775 - DNA, 33 bp, Homo sapien
agaacacctcaaaaacagtgttcacatctagat

SEQ ID NO: 1067776 - DNA, 33 bp, Homo sapien
agaacacctcaaaaacggtgttcacatctagat

SEQ ID NO: 1067777 - DNA, 33 bp, Homo sapien
agagttttgtgcagccaggagaaaggagatgaa

SEQ ID NO: 1067778 - DNA, 33 bp, Homo sapien
agagttttgtgcagccgggagaaaggagatgaa

SEQ ID NO: 1067779 - DNA, 33 bp, Homo sapien
ggaggctgtttgggtaagccagtgtgaatcact

SEQ ID NO: 1067780 - DNA, 33 bp, Homo sapien
ggaggctgtttgggtaggccagtgtgaatcact

SEQ ID NO: 1067781 - DNA, 33 bp, Homo sapien
gggtaccctctccgcaagcctaggctctttgtg

SEQ ID NO: 1067782 - DNA, 33 bp, Homo sapien
gggtaccctctccgcaggcctaggctctttgtg

SEQ ID NO: 1067783 - DNA, 33 bp, Homo sapien
aaaacgatctggttcagaactacattaatttaa

SEQ ID NO: 1067784 - DNA, 33 bp, Homo sapien
aaaacgatctggttcataactacattaatttaa

SEQ ID NO: 1067785 - DNA, 33 bp, Homo sapien
gaaaagtactaaactagctcatgccagatctat

SEQ ID NO: 1067786 - DNA, 33 bp, Homo sapien
gaaaagtactaaactatctcatgccagatctat

SEQ ID NO: 1067787 - DNA, 33 bp, Homo sapien
ctcccagcttcaacaaagagcaacttatgggca

SEQ ID NO: 1067788 - DNA, 33 bp, Homo sapien
ctcccagcttcaacaatgagcaacttatgggca

SEQ ID NO: 1067789 - DNA, 33 bp, Homo sapien
tcaacatcttttataacgtccctaatcccattc

SEQ ID NO: 1067790 - DNA, 33 bp, Homo sapien
tcaacatcttttataaggtccctaatcccattc

SEQ ID NO: 1067791 - DNA, 33 bp, Homo sapien
ggcactgaagaccttaaaggaataataaggaag

SEQ ID NO: 1067792 - DNA, 33 bp, Homo sapien
ggcactgaagaccttagaggaataataaggaag

SEQ ID NO: 1067793 - DNA, 33 bp, Homo sapien
agctagaaatcaataacagagagataaaaagaa

SEQ ID NO: 1067794 - DNA, 33 bp, Homo sapien
agctagaaatcaataatagagagataaaaagaa

SEQ ID NO: 1067795 - DNA, 33 bp, Homo sapien
ctacctttggctttcacaccgtctttggctcct

SEQ ID NO: 1067796 - DNA, 33 bp, Homo sapien
ctacctttggctttcataccgtctttggctcct

SEQ ID NO: 1067797 - DNA, 33 bp, Homo sapien
ggttctatctggaaaaatggagacatctggaag

SEQ ID NO: 1067798 - DNA, 33 bp, Homo sapien
ggttctatctggaaaagtggagacatctggaag

SEQ ID NO: 1067799 - DNA, 33 bp, Homo sapien
caaccttggcttagaacattgtgcaatgagcct

SEQ ID NO: 1067800 - DNA, 33 bp, Homo sapien
caaccttggcttagaatattgtgcaatgagcct

SEQ ID NO: 1067801 - DNA, 33 bp, Homo sapien
gattgcgctgggctaaagagagctttctagccc

SEQ ID NO: 1067802 - DNA, 33 bp, Homo sapien
gattgcgctgggctaacgagagctttctagccc

SEQ ID NO: 1067803 - DNA, 33 bp, Homo sapien
ccaccgttcgggtctccgacttcctggcttgag

SEQ ID NO: 1067804 - DNA, 33 bp, Homo sapien
ccaccgttcgggtctctgacttcctggcttgag

SEQ ID NO: 1067805 - DNA, 33 bp, Homo sapien
agattatcatgaaaaaatatgcctttgaggttg

SEQ ID NO: 1067806 - DNA, 33 bp, Homo sapien
agattatcatgaaaaactatgcctttgaggttg

SEQ ID NO: 1067807 - DNA, 33 bp, Homo sapien
tggaaacttagaatgccaggtttgaaaaggctt

SEQ ID NO: 1067808 - DNA, 33 bp, Homo sapien
tggaaacttagaatgcgaggtttgaaaaggctt

SEQ ID NO: 1067809 - DNA, 33 bp, Homo sapien
aatgcttccagttagccacaagactcttattgt

SEQ ID NO: 1067810 - DNA, 33 bp, Homo sapien
aatgcttccagttagcgacaagactcttattgt

SEQ ID NO: 1067811 - DNA, 33 bp, Homo sapien
atcaaactatatagcacgtattctgcaatttcc

SEQ ID NO: 1067812 - DNA, 33 bp, Homo sapien
atcaaactatatagcatgtattctgcaatttcc

SEQ ID NO: 1067813 - DNA, 33 bp, Homo sapien
ttcacaagcagaccccaataaacttcttacact

SEQ ID NO: 1067814 - DNA, 33 bp, Homo sapien
ttcacaagcagacccctataaacttcttacact

SEQ ID NO: 1067815 - DNA, 33 bp, Homo sapien
ctgcacttagaccacaatgattagcaatcagag

SEQ ID NO: 1067816 - DNA, 33 bp, Homo sapien
ctgcacttagaccacagtgattagcaatcagag

SEQ ID NO: 1067817 - DNA, 33 bp, Homo sapien
aagacactccaggagtcaagaggattaatagtg

SEQ ID NO: 1067818 - DNA, 33 bp, Homo sapien
aagacactccaggagttaagaggattaatagtg

SEQ ID NO: 1067819 - DNA, 33 bp, Homo sapien
ttatgtaattaaacgacattcttgttggcaatc

SEQ ID NO: 1067820 - DNA, 33 bp, Homo sapien
ttatgtaattaaacgatattcttgttggcaatc

SEQ ID NO: 1067821 - DNA, 33 bp, Homo sapien
gccagctacttatgaacggtgtggaatgttgca

SEQ ID NO: 1067822 - DNA, 33 bp, Homo sapien
gccagctacttatgaatggtgtggaatgttgca

SEQ ID NO: 1067823 - DNA, 33 bp, Homo sapien
taggtagttcctgcacaaggttttcctgtcaca

SEQ ID NO: 1067824 - DNA, 33 bp, Homo sapien
taggtagttcctgcacgaggttttcctgtcaca

SEQ ID NO: 1067825 - DNA, 33 bp, Homo sapien; identical to SEQ ID NO: 1067823

SEQ ID NO: 1067826 - DNA, 33 bp, Homo sapien; identical to SEQ ID NO: 1067824

SEQ ID NO: 1067827 - DNA, 33 bp, Homo sapien
gggtgttgaaatctccaatgataatagtagatg

SEQ ID NO: 1067828 - DNA, 33 bp, Homo sapien
gggtgttgaaatctcccatgataatagtagatg

SEQ ID NO: 1067829 - DNA, 33 bp, Homo sapien
ctccggatctgtaagcaatcaatttttgttctt

SEQ ID NO: 1067830 - DNA, 33 bp, Homo sapien
ctccggatctgtaagcgatcaatttttgttctt

SEQ ID NO: 1067831 - DNA, 33 bp, Homo sapien
ttttataccaatagacagtccaagtgttggagt

SEQ ID NO: 1067832 - DNA, 33 bp, Homo sapien
ttttataccaatagacggtccaagtgttggagt

SEQ ID NO: 1067833 - DNA, 33 bp, Homo sapien
gtctgttggataacgaactacacagggaatttt

SEQ ID NO: 1067834 - DNA, 33 bp, Homo sapien
gtctgttggataacgagctacacagggaatttt

SEQ ID NO: 1067835 - DNA, 33 bp, Homo sapien
gtcattatgttcaaaacagttccaacctgatgt

SEQ ID NO: 1067836 - DNA, 33 bp, Homo sapien
gtcattatgttcaaaagagttccaacctgatgt

SEQ ID NO: 1067837 - DNA, 33 bp, Homo sapien
ttggccagccttgaacaacaactgctcagaggg

SEQ ID NO: 1067838 - DNA, 33 bp, Homo sapien
ttggccagccttgaacgacaactgctcagaggg

SEQ ID NO: 1067839 - DNA, 33 bp, Homo sapien
attctaattaataatacgtaagtcagatgaatt

SEQ ID NO: 1067840 - DNA, 33 bp, Homo sapien
attctaattaataatatgtaagtcagatgaatt

SEQ ID NO: 1067841 - DNA, 33 bp, Homo sapien
aagagttcagtcaagaaatttggaagattgtta

SEQ ID NO: 1067842 - DNA, 33 bp, Homo sapien
aagagttcagtcaagacatttggaagattgtta

SEQ ID NO: 1067843 - DNA, 33 bp, Homo sapien
tttcactcatttaggccgacttcccccctatac

SEQ ID NO: 1067844 - DNA, 33 bp, Homo sapien
tttcactcatttaggctgacttcccccctatac

SEQ ID NO: 1067845 - DNA, 33 bp, Homo sapien
cctgggagccaaatgtcaacgtagttcttaacc

SEQ ID NO: 1067846 - DNA, 33 bp, Homo sapien
cctgggagccaaatgttaacgtagttcttaacc

SEQ ID NO: 1067847 - DNA, 33 bp, Homo sapien
agaacccagttttggcgctactttgcagggaat

SEQ ID NO: 1067848 - DNA, 33 bp, Homo sapien
agaacccagttttggctctactttgcagggaat

SEQ ID NO: 1067849 - DNA, 33 bp, Homo sapien
agtcagctgtttttcacacagatttcaggaggg

SEQ ID NO: 1067850 - DNA, 33 bp, Homo sapien
agtcagctgtttttcatacagatttcaggaggg

SEQ ID NO: 1067851 - DNA, 33 bp, Homo sapien
atcagtacagccattacggaaaatggtatgaag

SEQ ID NO: 1067852 - DNA, 33 bp, Homo sapien
atcagtacagccattatggaaaatggtatgaag

SEQ ID NO: 1067853 - DNA, 33 bp, Homo sapien
tgagggtttctgtaaccgagggacgccaaaacc

SEQ ID NO: 1067854 - DNA, 33 bp, Homo sapien
tgagggtttctgtaactgagggacgccaaaacc

SEQ ID NO: 1067855 - DNA, 33 bp, Homo sapien
aagtgcgtgtggcccaaagtagacagcatatag

SEQ ID NO: 1067856 - DNA, 33 bp, Homo sapien
aagtgcgtgtggcccagagtagacagcatatag

SEQ ID NO: 1067857 - DNA, 33 bp, Homo sapien
aggaagaattggttgcaaagacttcactggata

SEQ ID NO: 1067858 - DNA, 33 bp, Homo sapien
aggaagaattggttgcgaagacttcactggata

SEQ ID NO: 1067859 - DNA, 33 bp, Homo sapien
ttcaactgtattaaaaagtgttgggacaggagt

SEQ ID NO: 1067860 - DNA, 33 bp, Homo sapien
ttcaactgtattaaaaggtgttgggacaggagt

SEQ ID NO: 1067861 - DNA, 33 bp, Homo sapien
gacttgtgacaccaaaaggacatcacagaaaca

SEQ ID NO: 1067862 - DNA, 33 bp, Homo sapien
gacttgtgacaccaaagggacatcacagaaaca

SEQ ID NO: 1067863 - DNA, 33 bp, Homo sapien
agattgctcttgggaaccatgccgaaagtagtg

SEQ ID NO: 1067864 - DNA, 33 bp, Homo sapien
agattgctcttgggaatcatgccgaaagtagtg

SEQ ID NO: 1067865 - DNA, 33 bp, Homo sapien; identical to SEQ ID NO: 1067863

SEQ ID NO: 1067866 - DNA, 33 bp, Homo sapien; identical to SEQ ID NO: 1067864

SEQ ID NO: 1067867 - DNA, 33 bp, Homo sapien
acttgtggccaagttcaatgtggcctttggttt

SEQ ID NO: 1067868 - DNA, 33 bp, Homo sapien
acttgtggccaagttcgatgtggcctttggttt

SEQ ID NO: 1067869 - DNA, 33 bp, Homo sapien
gcttggcctggctttagggatgagagaagagag

SEQ ID NO: 1067870 - DNA, 33 bp, Homo sapien
gcttggcctggctttatggatgagagaagagag

SEQ ID NO: 1067871 - DNA, 33 bp, Homo sapien
aggaagatcagggttgaaccagaagtggaggtt

SEQ ID NO: 1067872 - DNA, 33 bp, Homo sapien
aggaagatcagggttgtaccagaagtggaggtt

SEQ ID NO: 1067873 - DNA, 33 bp, Homo sapien
tagtaaggaacagaataacttcaaaccccaccc

SEQ ID NO: 1067874 - DNA, 33 bp, Homo sapien
tagtaaggaacagaatgacttcaaaccccaccc

SEQ ID NO: 1067875 - DNA, 33 bp, Homo sapien
cttccccctcaatctaaaataaggttttctgga

SEQ ID NO: 1067876 - DNA, 33 bp, Homo sapien
cttccccctcaatctacaataaggttttctgga

SEQ ID NO: 1067877 - DNA, 33 bp, Homo sapien
ctaggctgtatacttaaaaggtggaactgctgg

SEQ ID NO: 1067878 - DNA, 33 bp, Homo sapien
ctaggctgtatacttagaaggtggaactgctgg

SEQ ID NO: 1067879 - DNA, 33 bp, Homo sapien
tgtctgttatttaggcagcaaatatcttctccc

SEQ ID NO: 1067880 - DNA, 33 bp, Homo sapien
tgtctgttatttaggctgcaaatatcttctccc

SEQ ID NO: 1067881 - DNA, 33 bp, Homo sapien
ctattttattacagtcaccctataacttctgtt

SEQ ID NO: 1067882 - DNA, 33 bp, Homo sapien
ctattttattacagtcgccctataacttctgtt

SEQ ID NO: 1067883 - DNA, 33 bp, Homo sapien
caaagggtaactgccacgtgatgatagcaaaac

SEQ ID NO: 1067884 - DNA, 33 bp, Homo sapien
caaagggtaactgccaggtgatgatagcaaaac

SEQ ID NO: 1067885 - DNA, 33 bp, Homo sapien
gctgggccggtaagtacggagcttcagtccgcg

SEQ ID NO: 1067886 - DNA, 33 bp, Homo sapien
gctgggccggtaagtatggagcttcagtccgcg

SEQ ID NO: 1067887 - DNA, 33 bp, Homo sapien
agttttcttccttgaacgtctgtcctcgttgat

SEQ ID NO: 1067888 - DNA, 33 bp, Homo sapien
agttttcttccttgaatgtctgtcctcgttgat

SEQ ID NO: 1067889 - DNA, 33 bp, Homo sapien
ccaaattcacattcatcaaagcagagtgacaat

SEQ ID NO: 1067890 - DNA, 33 bp, Homo sapien
ccaaattcacattcatgaaagcagagtgacaat

SEQ ID NO: 1067891 - DNA, 33 bp, Homo sapien
gccacccactgaatgaactgacccatggatagt

SEQ ID NO: 1067892 - DNA, 33 bp, Homo sapien
gccacccactgaatgagctgacccatggatagt

SEQ ID NO: 1067893 - DNA, 33 bp, Homo sapien
atcttcggcaatgttacctagatgccttccaat

SEQ ID NO: 1067894 - DNA, 33 bp, Homo sapien
atcttcggcaatgttagctagatgccttccaat

SEQ ID NO: 1067895 - DNA, 33 bp, Homo sapien
ggcgccttcagccatccatttctgacatccagg

SEQ ID NO: 1067896 - DNA, 33 bp, Homo sapien
ggcgccttcagccatctatttctgacatccagg

SEQ ID NO: 1067897 - DNA, 33 bp, Homo sapien
ttctcaatgagaaacccatgaaagagagagagc

SEQ ID NO: 1067898 - DNA, 33 bp, Homo sapien
ttctcaatgagaaacctatgaaagagagagagc

SEQ ID NO: 1067899 - DNA, 33 bp, Homo sapien
attttcagtgtacgccgaacacatcagcttctc

SEQ ID NO: 1067900 - DNA, 33 bp, Homo sapien
attttcagtgtacgcctaacacatcagcttctc

SEQ ID NO: 1067901 - DNA, 33 bp, Homo sapien
taagtctgcagacttgaaaaattgaagagtgac

SEQ ID NO: 1067902 - DNA, 33 bp, Homo sapien
taagtctgcagacttgcaaaattgaagagtgac

SEQ ID NO: 1067903 - DNA, 33 bp, Homo sapien
caaaacctagtggcctaaaacgagcattttgtt

SEQ ID NO: 1067904 - DNA, 33 bp, Homo sapien
caaaacctagtggcctgaaacgagcattttgtt

SEQ ID NO: 1067905 - DNA, 33 bp, Homo sapien
ctctttaataccaaaacccactgatgtccaagt

SEQ ID NO: 1067906 - DNA, 33 bp, Homo sapien
ctctttaataccaaaatccactgatgtccaagt

SEQ ID NO: 1067907 - DNA, 33 bp, Homo sapien
catctacacctttgcaaatataatcgtctctca

SEQ ID NO: 1067908 - DNA, 33 bp, Homo sapien
catctacacctttgcagatataatcgtctctca

SEQ ID NO: 1067909 - DNA, 33 bp, Homo sapien
ttacacccttaatccaatctcagcaaatcctgt

SEQ ID NO: 1067910 - DNA, 33 bp, Homo sapien
ttacacccttaatccagtctcagcaaatcctgt

SEQ ID NO: 1067911 - DNA, 33 bp, Homo sapien
ctatttagtgaagttaataaacacacttagctt

SEQ ID NO: 1067912 - DNA, 33 bp, Homo sapien
ctatttagtgaagttagtaaacacacttagctt

SEQ ID NO: 1067913 - DNA, 33 bp, Homo sapien
ataaatatgagggcacagtaaatgacaacttct

SEQ ID NO: 1067914 - DNA, 33 bp, Homo sapien
ataaatatgagggcacggtaaatgacaacttct

SEQ ID NO: 1067915 - DNA, 33 bp, Homo sapien
tgtctccggactacctaacgtatgcatgctgtg

SEQ ID NO: 1067916 - DNA, 33 bp, Homo sapien
tgtctccggactaccttacgtatgcatgctgtg

SEQ ID NO: 1067917 - DNA, 33 bp, Homo sapien
cacgttgtgttcactaccatagtgtcagtgcca

SEQ ID NO: 1067918 - DNA, 33 bp, Homo sapien
cacgttgtgttcactatcatagtgtcagtgcca

SEQ ID NO: 1067919 - DNA, 33 bp, Homo sapien
tgggccagacacctgcaagtacatttacataat

SEQ ID NO: 1067920 - DNA, 33 bp, Homo sapien
tgggccagacacctgcgagtacatttacataat

SEQ ID NO: 1067921 - DNA, 33 bp, Homo sapien
tcttggtggcgaaaatgactgggaacaagtagg

SEQ ID NO: 1067922 - DNA, 33 bp, Homo sapien
tcttggtggcgaaaattactgggaacaagtagg

SEQ ID NO: 1067923 - DNA, 33 bp, Homo sapien
ggttgtgtttggggaactggtagctagcaccac

SEQ ID NO: 1067924 - DNA, 33 bp, Homo sapien
ggttgtgtttggggaattggtagctagcaccac

SEQ ID NO: 1067925 - DNA, 33 bp, Homo sapien
ctaaaaatcctgattaaacctaccttgaagctt

SEQ ID NO: 1067926 - DNA, 33 bp, Homo sapien
ctaaaaatcctgattatacctaccttgaagctt

SEQ ID NO: 1067927 - DNA, 33 bp, Homo sapien
gtattaaataacatagcccaggtatttggttta

SEQ ID NO: 1067928 - DNA, 33 bp, Homo sapien
gtattaaataacatagtccaggtatttggttta

SEQ ID NO: 1067929 - DNA, 33 bp, Homo sapien
gtctgttcccatcaaagatatgccatgtacttt

SEQ ID NO: 1067930 - DNA, 33 bp, Homo sapien
gtctgttcccatcaaatatatgccatgtacttt

SEQ ID NO: 1067931 - DNA, 33 bp, Homo sapien
cgaggctgtacacttacaaactacttcacatac

SEQ ID NO: 1067932 - DNA, 33 bp, Homo sapien
cgaggctgtacacttagaaactacttcacatac

SEQ ID NO: 1067933 - DNA, 33 bp, Homo sapien
ttccctctaagcctaaaacgcttcatttctaga

SEQ ID NO: 1067934 - DNA, 33 bp, Homo sapien
ttccctctaagcctaatacgcttcatttctaga

SEQ ID NO: 1067935 - DNA, 33 bp, Homo sapien
ccagaaagcaaggccactaaagtcagacacaat

SEQ ID NO: 1067936 - DNA, 33 bp, Homo sapien
ccagaaagcaaggccattaaagtcagacacaat

SEQ ID NO: 1067937 - DNA, 33 bp, Homo sapien
ctatgtaaactctaaaatgttatgcaaatgata

SEQ ID NO: 1067938 - DNA, 33 bp, Homo sapien
ctatgtaaactctaaagtgttatgcaaatgata

SEQ ID NO: 1067939 - DNA, 33 bp, Homo sapien
cacaaatgaacatctcccatgaacatagatgta

SEQ ID NO: 1067940 - DNA, 33 bp, Homo sapien
cacaaatgaacatctctcatgaacatagatgta

SEQ ID NO: 1067941 - DNA, 33 bp, Homo sapien
ggcaaaattccaacaaagaacgagaacatagta

SEQ ID NO: 1067942 - DNA, 33 bp, Homo sapien
ggcaaaattccaacaaggaacgagaacatagta

SEQ ID NO: 1067943 - DNA, 33 bp, Homo sapien
caggacaccatcagacagagttctgacctcttc

SEQ ID NO: 1067944 - DNA, 33 bp, Homo sapien
caggacaccatcagaccgagttctgacctcttc

SEQ ID NO: 1067945 - DNA, 33 bp, Homo sapien
gttgtccactatctcactctgcgaacttcacag

SEQ ID NO: 1067946 - DNA, 33 bp, Homo sapien
gttgtccactatctcagtctgcgaacttcacag

SEQ ID NO: 1067947 - DNA, 33 bp, Homo sapien
ttccccaattcaaaacagacaatcacactgtcc

SEQ ID NO: 1067948 - DNA, 33 bp, Homo sapien
ttccccaattcaaaacggacaatcacactgtcc

SEQ ID NO: 1067949 - DNA, 33 bp, Homo sapien
acagagtagaggtaccactagatatgtatggca

SEQ ID NO: 1067950 - DNA, 33 bp, Homo sapien
acagagtagaggtaccgctagatatgtatggca

SEQ ID NO: 1067951 - DNA, 33 bp, Homo sapien
cgtcatctttaatccaacttctgactaggaatt

SEQ ID NO: 1067952 - DNA, 33 bp, Homo sapien
cgtcatctttaatccagcttctgactaggaatt

SEQ ID NO: 1067953 - DNA, 33 bp, Homo sapien
ctagggccacttagggaaacggaacacagaagc

SEQ ID NO: 1067954 - DNA, 33 bp, Homo sapien
ctagggccacttagggcaacggaacacagaagc

SEQ ID NO: 1067955 - DNA, 33 bp, Homo sapien
atgactagcaaccgaagaacgcacttgggtgtt

SEQ ID NO: 1067956 - DNA, 33 bp, Homo sapien
atgactagcaaccgaataacgcacttgggtgtt

SEQ ID NO: 1067957 - DNA, 33 bp, Homo sapien; identical to SEQ ID NO: 1067955

SEQ ID NO: 1067958 - DNA, 33 bp, Homo sapien; identical to SEQ ID NO: 1067956

SEQ ID NO: 1067959 - DNA, 33 bp, Homo sapien
cccacagccacaggaacgttgtattttatcatt

SEQ ID NO: 1067960 - DNA, 33 bp, Homo sapien
cccacagccacaggaatgttgtattttatcatt

SEQ ID NO: 1067961 - DNA, 33 bp, Homo sapien
atgacgtaatggaatcagacaattcagttttac

SEQ ID NO: 1067962 - DNA, 33 bp, Homo sapien
atgacgtaatggaatcggacaattcagttttac

SEQ ID NO: 1067963 - DNA, 33 bp, Homo sapien
gtatcacttgaagagaacagatattcacatttc

SEQ ID NO: 1067964 - DNA, 33 bp, Homo sapien
gtatcacttgaagagagcagatattcacatttc

SEQ ID NO: 1067965 - DNA, 33 bp, Homo sapien
aaagggagcgagaatcaccatattgaatgtacc

SEQ ID NO: 1067966 - DNA, 33 bp, Homo sapien
aaagggagcgagaatcgccatattgaatgtacc

SEQ ID NO: 1067967 - DNA, 33 bp, Homo sapien
cttcctcatgctgagaaagcgggtcacctgaga

SEQ ID NO: 1067968 - DNA, 33 bp, Homo sapien
cttcctcatgctgagagagcgggtcacctgaga

SEQ ID NO: 1067969 - DNA, 33 bp, Homo sapien
caggtattgccccagacgaagtggtttcacttt

SEQ ID NO: 1067970 - DNA, 33 bp, Homo sapien
caggtattgccccagaggaagtggtttcacttt

SEQ ID NO: 1067971 - DNA, 33 bp, Homo sapien
ggtgtggggagcttgacgataaacagcggctag

SEQ ID NO: 1067972 - DNA, 33 bp, Homo sapien
ggtgtggggagcttgatgataaacagcggctag

SEQ ID NO: 1067973 - DNA, 33 bp, Homo sapien
tcacagttgctcccaagtcttcatatctgaaag

SEQ ID NO: 1067974 - DNA, 33 bp, Homo sapien
tcacagttgctcccaattcttcatatctgaaag

SEQ ID NO: 1067975 - DNA, 33 bp, Homo sapien
aaagtcatttaggctacgcatagaggcccacac

SEQ ID NO: 1067976 - DNA, 33 bp, Homo sapien
aaagtcatttaggctaggcatagaggcccacac

SEQ ID NO: 1067977 - DNA, 33 bp, Homo sapien
aaatcttcaaatgttcagaaaagtaaagggaat

SEQ ID NO: 1067978 - DNA, 33 bp, Homo sapien
aaatcttcaaatgttcggaaaagtaaagggaat

SEQ ID NO: 1067979 - DNA, 33 bp, Homo sapien
aatgtgagagaggagaagggcgaacaaggagct

SEQ ID NO: 1067980 - DNA, 33 bp, Homo sapien
aatgtgagagaggagaggggcgaacaaggagct

SEQ ID NO: 1067981 - DNA, 33 bp, Homo sapien
gccataacaatcttgcaagactaactttaaaat

SEQ ID NO: 1067982 - DNA, 33 bp, Homo sapien
gccataacaatcttgcgagactaactttaaaat

SEQ ID NO: 1067983 - DNA, 33 bp, Homo sapien; identical to SEQ ID NO: 1067981

SEQ ID NO: 1067984 - DNA, 33 bp, Homo sapien; identical to SEQ ID NO: 1067982

SEQ ID NO: 1067985 - DNA, 33 bp, Homo sapien
ctggatgttgaaaaagactgcccgtatctctta

SEQ ID NO: 1067986 - DNA, 33 bp, Homo sapien
ctggatgttgaaaaaggctgcccgtatctctta

SEQ ID NO: 1067987 - DNA, 33 bp, Homo sapien
accactctacgctaacaggtgccattatgttcc

SEQ ID NO: 1067988 - DNA, 33 bp, Homo sapien
accactctacgctaaccggtgccattatgttcc

SEQ ID NO: 1067989 - DNA, 33 bp, Homo sapien
cacatccctcattttcaaagctgacgtcagggg

SEQ ID NO: 1067990 - DNA, 33 bp, Homo sapien
cacatccctcattttcgaagctgacgtcagggg

SEQ ID NO: 1067991 - DNA, 33 bp, Homo sapien
atatgctacactttcacgtgattgtcagcacag

SEQ ID NO: 1067992 - DNA, 33 bp, Homo sapien
atatgctacactttcatgtgattgtcagcacag

SEQ ID NO: 1067993 - DNA, 33 bp, Homo sapien
gacccttgtaataacactcttaaacacacaccg

SEQ ID NO: 1067994 - DNA, 33 bp, Homo sapien
gacccttgtaataacagtcttaaacacacaccg

SEQ ID NO: 1067995 - DNA, 33 bp, Homo sapien
gccagaggacatgttgaagacaataaacacctg

SEQ ID NO: 1067996 - DNA, 33 bp, Homo sapien
gccagaggacatgttggagacaataaacacctg

SEQ ID NO: 1067997 - DNA, 33 bp, Homo sapien
aagctggaattaaaaaattaaggtgcaagcata

SEQ ID NO: 1067998 - DNA, 33 bp, Homo sapien
aagctggaattaaaaacttaaggtgcaagcata

SEQ ID NO: 1067999 - DNA, 33 bp, Homo sapien
tttccagaatgttatacagctgaaatcatacag

SEQ ID NO: 1068000 - DNA, 33 bp, Homo sapien
tttccagaatgttatatagctgaaatcatacag

SEQ ID NO: 1068001 - DNA, 33 bp, Homo sapien
gtaaagacattaatgacgtgcattgactattgt

SEQ ID NO: 1068002 - DNA, 33 bp, Homo sapien
gtaaagacattaatgatgtgcattgactattgt

SEQ ID NO: 1068003 - DNA, 33 bp, Homo sapien
gctatgcctgctggccactactcagaggctagc

SEQ ID NO: 1068004 - DNA, 33 bp, Homo sapien
gctatgcctgctggccgctactcagaggctagc

SEQ ID NO: 1068005 - DNA, 33 bp, Homo sapien
tgtttgccattggagtcacccaagtaatgttga

SEQ ID NO: 1068006 - DNA, 33 bp, Homo sapien
tgtttgccattggagtgacccaagtaatgttga

SEQ ID NO: 1068007 - DNA, 33 bp, Homo sapien
gcttccttagtctccccctatgcttaggcaaaa

SEQ ID NO: 1068008 - DNA, 33 bp, Homo sapien
gcttccttagtctccctctatgcttaggcaaaa

SEQ ID NO: 1068009 - DNA, 33 bp, Homo sapien
ctcctccgatttgggcaccaccgtcacccgagc

SEQ ID NO: 1068010 - DNA, 33 bp, Homo sapien
ctcctccgatttgggcgccaccgtcacccgagc

SEQ ID NO: 1068011 - DNA, 33 bp, Homo sapien
aaatctgaataagcaaagacatactgaatctga

SEQ ID NO: 1068012 - DNA, 33 bp, Homo sapien
aaatctgaataagcaaggacatactgaatctga

SEQ ID NO: 1068013 - DNA, 33 bp, Homo sapien
ccacatcctggataagaatctgcctcatgtcat

SEQ ID NO: 1068014 - DNA, 33 bp, Homo sapien
ccacatcctggataagcatctgcctcatgtcat

SEQ ID NO: 1068015 - DNA, 33 bp, Homo sapien
aaccacaattaaataccatcttacaccagttag

SEQ ID NO: 1068016 - DNA, 33 bp, Homo sapien
aaccacaattaaatactatcttacaccagttag

SEQ ID NO: 1068017 - DNA, 33 bp, Homo sapien
tgatctgatgctatcgacaggtagatactgtca

SEQ ID NO: 1068018 - DNA, 33 bp, Homo sapien
tgatctgatgctatcgccaggtagatactgtca

SEQ ID NO: 1068019 - DNA, 33 bp, Homo sapien
aaatgtatgataacatcagcaggaagttctcga

SEQ ID NO: 1068020 - DNA, 33 bp, Homo sapien
aaatgtatgataacattagcaggaagttctcga

SEQ ID NO: 1068021 - DNA, 33 bp, Homo sapien
gttcagcaggaaattccactactctgtcaaaat

SEQ ID NO: 1068022 - DNA, 33 bp, Homo sapien
gttcagcaggaaattctactactctgtcaaaat

SEQ ID NO: 1068023 - DNA, 33 bp, Homo sapien
atatgaacaggtatggcaattctgaactgagaa

SEQ ID NO: 1068024 - DNA, 33 bp, Homo sapien
atatgaacaggtatggtaattctgaactgagaa

SEQ ID NO: 1068025 - DNA, 33 bp, Homo sapien
gactgagccaatggagaagccgaaatatgatgt

SEQ ID NO: 1068026 - DNA, 33 bp, Homo sapien
gactgagccaatggaggagccgaaatatgatgt

SEQ ID NO: 1068027 - DNA, 33 bp, Homo sapien
aactgctcttcaaataccgacagctcttcctcc

SEQ ID NO: 1068028 - DNA, 33 bp, Homo sapien
aactgctcttcaaatagcgacagctcttcctcc

SEQ ID NO: 1068029 - DNA, 33 bp, Homo sapien
gcctgttttttgtgtcgctaagctccaggaatc

SEQ ID NO: 1068030 - DNA, 33 bp, Homo sapien
gcctgttttttgtgtctctaagctccaggaatc

SEQ ID NO: 1068031 - DNA, 33 bp, Homo sapien
atcacaaacagaatcccgagagtaggggaaggc

SEQ ID NO: 1068032 - DNA, 33 bp, Homo sapien
atcacaaacagaatccggagagtaggggaaggc

SEQ ID NO: 1068033 - DNA, 33 bp, Homo sapien
gtcatggttacaatgcacttaaagctgagggat

SEQ ID NO: 1068034 - DNA, 33 bp, Homo sapien
gtcatggttacaatgcgcttaaagctgagggat

SEQ ID NO: 1068035 - DNA, 33 bp, Homo sapien
ggtccaaaatagagaactgcgcttgcctaatat

SEQ ID NO: 1068036 - DNA, 33 bp, Homo sapien
ggtccaaaatagagaattgcgcttgcctaatat

SEQ ID NO: 1068037 - DNA, 33 bp, Homo sapien
ctgggttaaggagccaccatctacacttaaaac

SEQ ID NO: 1068038 - DNA, 33 bp, Homo sapien
ctgggttaaggagccatcatctacacttaaaac

SEQ ID NO: 1068039 - DNA, 33 bp, Homo sapien
atgagctagataatcagcccttgttgaagcata

SEQ ID NO: 1068040 - DNA, 33 bp, Homo sapien
atgagctagataatcatcccttgttgaagcata

SEQ ID NO: 1068041 - DNA, 33 bp, Homo sapien
gattctgtaggcagtagagtactgtggaaggtg

SEQ ID NO: 1068042 - DNA, 33 bp, Homo sapien
gattctgtaggcagtatagtactgtggaaggtg

SEQ ID NO: 1068043 - DNA, 33 bp, Homo sapien
agttttaggcatctacgggagatcttagaatga

SEQ ID NO: 1068044 - DNA, 33 bp, Homo sapien
agttttaggcatctactggagatcttagaatga

SEQ ID NO: 1068045 - DNA, 33 bp, Homo sapien
ttgtagtttcatagcgaactgtgaaattcatct

SEQ ID NO: 1068046 - DNA, 33 bp, Homo sapien
ttgtagtttcatagcgtactgtgaaattcatct

SEQ ID NO: 1068047 - DNA, 33 bp, Homo sapien
aaaataatgatagatccgatattctaccatctt

SEQ ID NO: 1068048 - DNA, 33 bp, Homo sapien
aaaataatgatagatctgatattctaccatctt

SEQ ID NO: 1068049 - DNA, 33 bp, Homo sapien
tgatattcctcttagcacttttctctagtctat

SEQ ID NO: 1068050 - DNA, 33 bp, Homo sapien
tgatattcctcttagcgcttttctctagtctat

SEQ ID NO: 1068051 - DNA, 33 bp, Homo sapien
tgaatgttttgaatacaaggagaataatatact

SEQ ID NO: 1068052 - DNA, 33 bp, Homo sapien
tgaatgttttgaatacgaggagaataatatact

SEQ ID NO: 1068053 - DNA, 33 bp, Homo sapien
gatttcacagacgcataaaaaggtcctcgagag

SEQ ID NO: 1068054 - DNA, 33 bp, Homo sapien
gatttcacagacgcatgaaaaggtcctcgagag

SEQ ID NO: 1068055 - DNA, 33 bp, Homo sapien
tggaatcacttgtggagctttaaaagtggaaaa

SEQ ID NO: 1068056 - DNA, 33 bp, Homo sapien
tggaatcacttgtggatctttaaaagtggaaaa

SEQ ID NO: 1068057 - DNA, 33 bp, Homo sapien
ctgaggtagaatttgaagtgaaagatgtgtatt

SEQ ID NO: 1068058 - DNA, 33 bp, Homo sapien
ctgaggtagaatttgacgtgaaagatgtgtatt

SEQ ID NO: 1068059 - DNA, 33 bp, Homo sapien
ccatttaataactccacgtggtcttaaccaaca

SEQ ID NO: 1068060 - DNA, 33 bp, Homo sapien
ccatttaataactccaggtggtcttaaccaaca

SEQ ID NO: 1068061 - DNA, 33 bp, Homo sapien
tatgctaaagaggttgacaaagtatcacgcctg

SEQ ID NO: 1068062 - DNA, 33 bp, Homo sapien
tatgctaaagaggttggcaaagtatcacgcctg

SEQ ID NO: 1068063 - DNA, 33 bp, Homo sapien
tgtaataatctttgtgaatggatacattaatgt

SEQ ID NO: 1068064 - DNA, 33 bp, Homo sapien
tgtaataatctttgtgcatggatacattaatgt

SEQ ID NO: 1068065 - DNA, 33 bp, Homo sapien
gcataaatgttttaaaagtaaggacatggtaat

SEQ ID NO: 1068066 - DNA, 33 bp, Homo sapien
gcataaatgttttaaacgtaaggacatggtaat

SEQ ID NO: 1068067 - DNA, 33 bp, Homo sapien
ttgaaaagcacttttacaaatatattcttttaa

SEQ ID NO: 1068068 - DNA, 33 bp, Homo sapien
ttgaaaagcacttttagaaatatattcttttaa

SEQ ID NO: 1068069 - DNA, 33 bp, Homo sapien
tctcaggatgggaaacggatgaattcacattgt

SEQ ID NO: 1068070 - DNA, 33 bp, Homo sapien
tctcaggatgggaaactgatgaattcacattgt

SEQ ID NO: 1068071 - DNA, 33 bp, Homo sapien
ttctatactcattgcaatcatttataaggaata

SEQ ID NO: 1068072 - DNA, 33 bp, Homo sapien
ttctatactcattgcactcatttataaggaata

SEQ ID NO: 1068073 - DNA, 33 bp, Homo sapien
aattattttagctagccccagtagaagcactca

SEQ ID NO: 1068074 - DNA, 33 bp, Homo sapien
aattattttagctagctccagtagaagcactca

SEQ ID NO: 1068075 - DNA, 33 bp, Homo sapien
tctgccatattttgaacgttagcctgttgattt

SEQ ID NO: 1068076 - DNA, 33 bp, Homo sapien
tctgccatattttgaatgttagcctgttgattt

SEQ ID NO: 1068077 - DNA, 33 bp, Homo sapien
acaaatacgcctttgaaaagtatagagaccaat

SEQ ID NO: 1068078 - DNA, 33 bp, Homo sapien
acaaatacgcctttgataagtatagagaccaat

SEQ ID NO: 1068079 - DNA, 33 bp, Homo sapien
gagctaggatttgcaactggatctgaaagccca

SEQ ID NO: 1068080 - DNA, 33 bp, Homo sapien
gagctaggatttgcaattggatctgaaagccca

SEQ ID NO: 1068081 - DNA, 33 bp, Homo sapien
ctgaggattctactaaataatctgtgtattagg

SEQ ID NO: 1068082 - DNA, 33 bp, Homo sapien
ctgaggattctactaagtaatctgtgtattagg

SEQ ID NO: 1068083 - DNA, 33 bp, Homo sapien
tactcatgttgttgccactgtctacaatgtccc

SEQ ID NO: 1068084 - DNA, 33 bp, Homo sapien
tactcatgttgttgccgctgtctacaatgtccc

SEQ ID NO: 1068085 - DNA, 33 bp, Homo sapien
gcaaggtattaagtgcaaagtgaatgatataga

SEQ ID NO: 1068086 - DNA, 33 bp, Homo sapien
gcaaggtattaagtgcgaagtgaatgatataga

SEQ ID NO: 1068087 - DNA, 33 bp, Homo sapien
tgctaaggaccatacacagtctatctcatttaa

SEQ ID NO: 1068088 - DNA, 33 bp, Homo sapien
tgctaaggaccatacatagtctatctcatttaa

SEQ ID NO: 1068089 - DNA, 33 bp, Homo sapien
tactttgaagcctctacaacttctgaaatttta

SEQ ID NO: 1068090 - DNA, 33 bp, Homo sapien
tactttgaagcctctataacttctgaaatttta

SEQ ID NO: 1068091 - DNA, 33 bp, Homo sapien
taggcttgccaaaatcgcacaggagtcagggat

SEQ ID NO: 1068092 - DNA, 33 bp, Homo sapien
taggcttgccaaaatctcacaggagtcagggat

SEQ ID NO: 1068093 - DNA, 33 bp, Homo sapien
acttagagacagcaaaatccacatatcagtctg

SEQ ID NO: 1068094 - DNA, 33 bp, Homo sapien
acttagagacagcaaagtccacatatcagtctg

SEQ ID NO: 1068095 - DNA, 33 bp, Homo sapien
caggattaacatggccaccagagattcttagat

SEQ ID NO: 1068096 - DNA, 33 bp, Homo sapien
caggattaacatggcctccagagattcttagat

SEQ ID NO: 1068097 - DNA, 33 bp, Homo sapien
acctactaactaatgacccctacctaaagtctc

SEQ ID NO: 1068098 - DNA, 33 bp, Homo sapien
acctactaactaatgatccctacctaaagtctc

SEQ ID NO: 1068099 - DNA, 33 bp, Homo sapien
cgaatttgtcctccaacatttatgtgttgaaac

SEQ ID NO: 1068100 - DNA, 33 bp, Homo sapien
cgaatttgtcctccaagatttatgtgttgaaac

SEQ ID NO: 1068101 - DNA, 33 bp, Homo sapien
gaaaggacctaagtaactgacctgacatcaggt

SEQ ID NO: 1068102 - DNA, 33 bp, Homo sapien
gaaaggacctaagtaattgacctgacatcaggt

SEQ ID NO: 1068103 - DNA, 33 bp, Homo sapien
agaagatgtacaaataccccacaaacatgaaaa

SEQ ID NO: 1068104 - DNA, 33 bp, Homo sapien
agaagatgtacaaatagcccacaaacatgaaaa

SEQ ID NO: 1068105 - DNA, 33 bp, Homo sapien
tatgactggtatgtacaatcaacatgacttatc

SEQ ID NO: 1068106 - DNA, 33 bp, Homo sapien
tatgactggtatgtacgatcaacatgacttatc

SEQ ID NO: 1068107 - DNA, 33 bp, Homo sapien
agtatttcaccactgaactaataactacaggtt

SEQ ID NO: 1068108 - DNA, 33 bp, Homo sapien
agtatttcaccactgagctaataactacaggtt

SEQ ID NO: 1068109 - DNA, 33 bp, Homo sapien
taagtgaaaaaaggcaatgacccgattatatat

SEQ ID NO: 1068110 - DNA, 33 bp, Homo sapien
taagtgaaaaaaggcattgacccgattatatat

SEQ ID NO: 1068111 - DNA, 33 bp, Homo sapien
gtttttacctgtctctaaagtagaatatctgct

SEQ ID NO: 1068112 - DNA, 33 bp, Homo sapien
gtttttacctgtctctgaagtagaatatctgct

SEQ ID NO: 1068113 - DNA, 33 bp, Homo sapien
gaaggcagggaagatacaaaagctatgggggtt

SEQ ID NO: 1068114 - DNA, 33 bp, Homo sapien
gaaggcagggaagatataaaagctatgggggtt

SEQ ID NO: 1068115 - DNA, 33 bp, Homo sapien
gtttgcaaagaactgacaatatagagcccaggt

SEQ ID NO: 1068116 - DNA, 33 bp, Homo sapien
gtttgcaaagaactgagaatatagagcccaggt

SEQ ID NO: 1068117 - DNA, 33 bp, Homo sapien
ctgttccatccaactccatctttacgcacacta

SEQ ID NO: 1068118 - DNA, 33 bp, Homo sapien
ctgttccatccaactctatctttacgcacacta

SEQ ID NO: 1068119 - DNA, 33 bp, Homo sapien
tccaaagagcacgtgggaaaaactccttcctta

SEQ ID NO: 1068120 - DNA, 33 bp, Homo sapien
tccaaagagcacgtggtaaaaactccttcctta

SEQ ID NO: 1068121 - DNA, 33 bp, Homo sapien
cttactagctgagtgacgttgagcagatatgta

SEQ ID NO: 1068122 - DNA, 33 bp, Homo sapien
cttactagctgagtgatgttgagcagatatgta

SEQ ID NO: 1068123 - DNA, 33 bp, Homo sapien
agcaggcagtggtccaagatttttctctaaact

SEQ ID NO: 1068124 - DNA, 33 bp, Homo sapien
agcaggcagtggtccaggatttttctctaaact

SEQ ID NO: 1068125 - DNA, 33 bp, Homo sapien
tgatttttgtataacaggagagataaagattca

SEQ ID NO: 1068126 - DNA, 33 bp, Homo sapien
tgatttttgtataacatgagagataaagattca

SEQ ID NO: 1068127 - DNA, 33 bp, Homo sapien
acttagttgtcctcaaactttccagtacattag

SEQ ID NO: 1068128 - DNA, 33 bp, Homo sapien
acttagttgtcctcaagctttccagtacattag

SEQ ID NO: 1068129 - DNA, 33 bp, Homo sapien
gtcaagaatataacaacgtgacccaggaaaaaa

SEQ ID NO: 1068130 - DNA, 33 bp, Homo sapien
gtcaagaatataacaatgtgacccaggaaaaaa

SEQ ID NO: 1068131 - DNA, 33 bp, Homo sapien
tgtcaggatgttaagacagtcaagggctctttg

SEQ ID NO: 1068132 - DNA, 33 bp, Homo sapien
tgtcaggatgttaagatagtcaagggctctttg

SEQ ID NO: 1068133 - DNA, 33 bp, Homo sapien
aatcaaattgtctcagcaataagaagcctttgt

SEQ ID NO: 1068134 - DNA, 33 bp, Homo sapien
aatcaaattgtctcagtaataagaagcctttgt

SEQ ID NO: 1068135 - DNA, 33 bp, Homo sapien
ctagctatctatgctaccaaggtagaaatatgt

SEQ ID NO: 1068136 - DNA, 33 bp, Homo sapien
ctagctatctatgctatcaaggtagaaatatgt

SEQ ID NO: 1068137 - DNA, 33 bp, Homo sapien
ttatgctccaaatctacggcactaaaattaatc

SEQ ID NO: 1068138 - DNA, 33 bp, Homo sapien
ttatgctccaaatctatggcactaaaattaatc

SEQ ID NO: 1068139 - DNA, 33 bp, Homo sapien
ctttagagataggcggcatcatgtagcgcgtga

SEQ ID NO: 1068140 - DNA, 33 bp, Homo sapien
ctttagagataggcggtatcatgtagcgcgtga

SEQ ID NO: 1068141 - DNA, 33 bp, Homo sapien
tcatccttaatccccacagttggaagcaaatac

SEQ ID NO: 1068142 - DNA, 33 bp, Homo sapien
tcatccttaatccccatagttggaagcaaatac

SEQ ID NO: 1068143 - DNA, 33 bp, Homo sapien
attttcagaagcagatgatcctgcacttagttg

SEQ ID NO: 1068144 - DNA, 33 bp, Homo sapien
attttcagaagcagattatcctgcacttagttg

SEQ ID NO: 1068145 - DNA, 33 bp, Homo sapien
gggttgggagtggcaaatgctattgtttggtct

SEQ ID NO: 1068146 - DNA, 33 bp, Homo sapien
gggttgggagtggcaactgctattgtttggtct

SEQ ID NO: 1068147 - DNA, 33 bp, Homo sapien
aattagctgaatgaaaactggtgatcaggggag

SEQ ID NO: 1068148 - DNA, 33 bp, Homo sapien
aattagctgaatgaaacctggtgatcaggggag

SEQ ID NO: 1068149 - DNA, 33 bp, Homo sapien
gaaaagaccaaatctacgtaaatctaaagtgaa

SEQ ID NO: 1068150 - DNA, 33 bp, Homo sapien
gaaaagaccaaatctatgtaaatctaaagtgaa

SEQ ID NO: 1068151 - DNA, 33 bp, Homo sapien
ttgtgattaaagatacacgtttgagaggaagct

SEQ ID NO: 1068152 - DNA, 33 bp, Homo sapien
ttgtgattaaagatacgcgtttgagaggaagct

SEQ ID NO: 1068153 - DNA, 33 bp, Homo sapien
tactgacaattttctgaaggataatcccaatgc

SEQ ID NO: 1068154 - DNA, 33 bp, Homo sapien
tactgacaattttctggaggataatcccaatgc

SEQ ID NO: 1068155 - DNA, 33 bp, Homo sapien
cagggaatgtacaagacggcccaacagatgatc

SEQ ID NO: 1068156 - DNA, 33 bp, Homo sapien
cagggaatgtacaagatggcccaacagatgatc

SEQ ID NO: 1068157 - DNA, 33 bp, Homo sapien
gggcttcagtctttgcaatctccaagttacccc

SEQ ID NO: 1068158 - DNA, 33 bp, Homo sapien
gggcttcagtctttgccatctccaagttacccc

SEQ ID NO: 1068159 - DNA, 33 bp, Homo sapien
ttgagggagaagctaacggcacccaaaatattt

SEQ ID NO: 1068160 - DNA, 33 bp, Homo sapien
ttgagggagaagctaagggcacccaaaatattt

SEQ ID NO: 1068161 - DNA, 33 bp, Homo sapien
gctttcttcctgttcaacagatgcctgctctct

SEQ ID NO: 1068162 - DNA, 33 bp, Homo sapien
gctttcttcctgttcagcagatgcctgctctct

SEQ ID NO: 1068163 - DNA, 33 bp, Homo sapien
atgtttgcatttgcaacggatgtccttaatgcc

SEQ ID NO: 1068164 - DNA, 33 bp, Homo sapien
atgtttgcatttgcaatggatgtccttaatgcc

SEQ ID NO: 1068165 - DNA, 33 bp, Homo sapien
attttctttttgactgaaaaattcctatcttgc

SEQ ID NO: 1068166 - DNA, 33 bp, Homo sapien
attttctttttgactgcaaaattcctatcttgc

SEQ ID NO: 1068167 - DNA, 33 bp, Homo sapien
gacacctttctgacatcacccaacctttgcaca

SEQ ID NO: 1068168 - DNA, 33 bp, Homo sapien
gacacctttctgacattacccaacctttgcaca

SEQ ID NO: 1068169 - DNA, 33 bp, Homo sapien
cagctcttttcaactacgaagcagaagtgaatt

SEQ ID NO: 1068170 - DNA, 33 bp, Homo sapien
cagctcttttcaactatgaagcagaagtgaatt

SEQ ID NO: 1068171 - DNA, 33 bp, Homo sapien
cacccattttctgtggaatgtaaaaatccgttt

SEQ ID NO: 1068172 - DNA, 33 bp, Homo sapien
cacccattttctgtggcatgtaaaaatccgttt

SEQ ID NO: 1068173 - DNA, 33 bp, Homo sapien
acttggtgctaaataaatatatgctagctgctg

SEQ ID NO: 1068174 - DNA, 33 bp, Homo sapien
acttggtgctaaataagtatatgctagctgctg

SEQ ID NO: 1068175 - DNA, 33 bp, Homo sapien
tctgagatggcatttaaactattaggagtactc

SEQ ID NO: 1068176 - DNA, 33 bp, Homo sapien
tctgagatggcatttagactattaggagtactc

SEQ ID NO: 1068177 - DNA, 33 bp, Homo sapien
agcctagtcactctagcccaacttgggaaagct

SEQ ID NO: 1068178 - DNA, 33 bp, Homo sapien
agcctagtcactctagtccaacttgggaaagct

SEQ ID NO: 1068179 - DNA, 33 bp, Homo sapien
tctaacaggaaaactcactgattaagcacctta

SEQ ID NO: 1068180 - DNA, 33 bp, Homo sapien
tctaacaggaaaactcgctgattaagcacctta

SEQ ID NO: 1068181 - DNA, 33 bp, Homo sapien
aaacaaagataatctacgacaaccatgacaaaa

SEQ ID NO: 1068182 - DNA, 33 bp, Homo sapien
aaacaaagataatctatgacaaccatgacaaaa

SEQ ID NO: 1068183 - DNA, 33 bp, Homo sapien
gttcaagagctacaaagttaattagaaatgcct

SEQ ID NO: 1068184 - DNA, 33 bp, Homo sapien
gttcaagagctacaaatttaattagaaatgcct

SEQ ID NO: 1068185 - DNA, 33 bp, Homo sapien
ttgaggtgcttcttaacataaagattcctgggc

SEQ ID NO: 1068186 - DNA, 33 bp, Homo sapien
ttgaggtgcttcttaatataaagattcctgggc

SEQ ID NO: 1068187 - DNA, 33 bp, Homo sapien
ggatttctagcttgtcacaatcaccatagatac

SEQ ID NO: 1068188 - DNA, 33 bp, Homo sapien
ggatttctagcttgtcgcaatcaccatagatac

SEQ ID NO: 1068189 - DNA, 33 bp, Homo sapien
cgttcacaagcagtacagaggcgtcttacagct

SEQ ID NO: 1068190 - DNA, 33 bp, Homo sapien
cgttcacaagcagtacggaggcgtcttacagct

SEQ ID NO: 1068191 - DNA, 33 bp, Homo sapien
aaacaagagatgagacaaattagtaggctatta

SEQ ID NO: 1068192 - DNA, 33 bp, Homo sapien
aaacaagagatgagaccaattagtaggctatta

SEQ ID NO: 1068193 - DNA, 33 bp, Homo sapien
ccaacattatatttaccgatgtgtgatcttttt

SEQ ID NO: 1068194 - DNA, 33 bp, Homo sapien
ccaacattatatttactgatgtgtgatcttttt

SEQ ID NO: 1068195 - DNA, 33 bp, Homo sapien
tatcctatttacctacacattcctctatactga

SEQ ID NO: 1068196 - DNA, 33 bp, Homo sapien
tatcctatttacctacgcattcctctatactga

SEQ ID NO: 1068197 - DNA, 33 bp, Homo sapien
actctcttccttgaacccacataaaactttatt

SEQ ID NO: 1068198 - DNA, 33 bp, Homo sapien
actctcttccttgaactcacataaaactttatt

SEQ ID NO: 1068199 - DNA, 33 bp, Homo sapien
ttgtttattgttagcacatagaaatactactaa

SEQ ID NO: 1068200 - DNA, 33 bp, Homo sapien
ttgtttattgttagcatatagaaatactactaa

SEQ ID NO: 1068201 - DNA, 33 bp, Homo sapien
tcatgtttgcctctgaaaaaagaaatgattcta

SEQ ID NO: 1068202 - DNA, 33 bp, Homo sapien
tcatgtttgcctctgagaaaagaaatgattcta

SEQ ID NO: 1068203 - DNA, 33 bp, Homo sapien
attcacttctacttggaaaaacctgagaagagt

SEQ ID NO: 1068204 - DNA, 33 bp, Homo sapien
attcacttctacttgggaaaacctgagaagagt

SEQ ID NO: 1068205 - DNA, 33 bp, Homo sapien
tcttgtgaagtagtcaaacccaagtaacatgaa

SEQ ID NO: 1068206 - DNA, 33 bp, Homo sapien
tcttgtgaagtagtcacacccaagtaacatgaa

SEQ ID NO: 1068207 - DNA, 33 bp, Homo sapien
caggcagaatagcatgacagttaagagcagagg

SEQ ID NO: 1068208 - DNA, 33 bp, Homo sapien
caggcagaatagcatggcagttaagagcagagg

SEQ ID NO: 1068209 - DNA, 33 bp, Homo sapien
atcagtacttgatacaatcataagtaaggcctt

SEQ ID NO: 1068210 - DNA, 33 bp, Homo sapien
atcagtacttgatacagtcataagtaaggcctt

SEQ ID NO: 1068211 - DNA, 33 bp, Homo sapien
atggcctaaggggaaacctcaagcttttgatat

SEQ ID NO: 1068212 - DNA, 33 bp, Homo sapien
atggcctaaggggaaatctcaagcttttgatat

SEQ ID NO: 1068213 - DNA, 33 bp, Homo sapien
aatgccctgaaatctgacacgatgctgagtccg

SEQ ID NO: 1068214 - DNA, 33 bp, Homo sapien
aatgccctgaaatctggcacgatgctgagtccg

SEQ ID NO: 1068215 - DNA, 33 bp, Homo sapien
gtttggattaaactcaagaatcttgcactcctg

SEQ ID NO: 1068216 - DNA, 33 bp, Homo sapien
gtttggattaaactcaggaatcttgcactcctg

SEQ ID NO: 1068217 - DNA, 33 bp, Homo sapien
ttaaataatctaataaccaaatctgcaagtcct

SEQ ID NO: 1068218 - DNA, 33 bp, Homo sapien
ttaaataatctaataatcaaatctgcaagtcct

SEQ ID NO: 1068219 - DNA, 33 bp, Homo sapien
tggtatttctactggactcaataaaacacaaaa

SEQ ID NO: 1068220 - DNA, 33 bp, Homo sapien
tggtatttctactggattcaataaaacacaaaa

SEQ ID NO: 1068221 - DNA, 33 bp, Homo sapien
tgaaataaatggagaacattataaggcaatata

SEQ ID NO: 1068222 - DNA, 33 bp, Homo sapien
tgaaataaatggagaatattataaggcaatata

SEQ ID NO: 1068223 - DNA, 33 bp, Homo sapien
tctcccatccacaataaatttttaaggctctgg

SEQ ID NO: 1068224 - DNA, 33 bp, Homo sapien
tctcccatccacaatacatttttaaggctctgg

SEQ ID NO: 1068225 - DNA, 33 bp, Homo sapien
atcttgctgcctcagaagttttgctcaaactgt

SEQ ID NO: 1068226 - DNA, 33 bp, Homo sapien
atcttgctgcctcagaggttttgctcaaactgt

SEQ ID NO: 1068227 - DNA, 33 bp, Homo sapien
tcacagagggatttccagactttaatttttcag

SEQ ID NO: 1068228 - DNA, 33 bp, Homo sapien
tcacagagggatttccggactttaatttttcag

SEQ ID NO: 1068229 - DNA, 33 bp, Homo sapien
cacaaccaagaatcaacgtgaccatgttcctcc

SEQ ID NO: 1068230 - DNA, 33 bp, Homo sapien
cacaaccaagaatcaatgtgaccatgttcctcc

SEQ ID NO: 1068231 - DNA, 33 bp, Homo sapien
cacaacaatacaaccacgttattaggtataaga

SEQ ID NO: 1068232 - DNA, 33 bp, Homo sapien
cacaacaatacaaccatgttattaggtataaga

SEQ ID NO: 1068233 - DNA, 33 bp, Homo sapien
aaatcacattcctcacacttgttacttttaatg

SEQ ID NO: 1068234 - DNA, 33 bp, Homo sapien
aaatcacattcctcacgcttgttacttttaatg

SEQ ID NO: 1068235 - DNA, 33 bp, Homo sapien
caattgcgacaaaagcaaaaatggacaaatggg

SEQ ID NO: 1068236 - DNA, 33 bp, Homo sapien
caattgcgacaaaagcgaaaatggacaaatggg

SEQ ID NO: 1068237 - DNA, 33 bp, Homo sapien
atcaattaaagtgatacgtcataacaacagaag

SEQ ID NO: 1068238 - DNA, 33 bp, Homo sapien
atcaattaaagtgatatgtcataacaacagaag

SEQ ID NO: 1068239 - DNA, 33 bp, Homo sapien
ttattggtctcatctacgttttgattttttaaa

SEQ ID NO: 1068240 - DNA, 33 bp, Homo sapien
ttattggtctcatctatgttttgattttttaaa

SEQ ID NO: 1068241 - DNA, 33 bp, Homo sapien
gctttgggtacaaacaatcttgccaactacata

SEQ ID NO: 1068242 - DNA, 33 bp, Homo sapien
gctttgggtacaaacagtcttgccaactacata

SEQ ID NO: 1068243 - DNA, 33 bp, Homo sapien
caccttaacccagataaaatggcttgtatccaa

SEQ ID NO: 1068244 - DNA, 33 bp, Homo sapien
caccttaacccagatagaatggcttgtatccaa

SEQ ID NO: 1068245 - DNA, 33 bp, Homo sapien
cttttgtgaagttaaaagtaccacttgaataag

SEQ ID NO: 1068246 - DNA, 33 bp, Homo sapien
cttttgtgaagttaaatgtaccacttgaataag

SEQ ID NO: 1068247 - DNA, 33 bp, Homo sapien
ttctgcagaatagatgaaggtagatccagagaa

SEQ ID NO: 1068248 - DNA, 33 bp, Homo sapien
ttctgcagaatagatgcaggtagatccagagaa

SEQ ID NO: 1068249 - DNA, 33 bp, Homo sapien
tgagcaaataaagcaacgagaaactccctacca

SEQ ID NO: 1068250 - DNA, 33 bp, Homo sapien
tgagcaaataaagcaatgagaaactccctacca

SEQ ID NO: 1068251 - DNA, 33 bp, Homo sapien
caatggggtagtaaaacatattgtgcctacagt

SEQ ID NO: 1068252 - DNA, 33 bp, Homo sapien
caatggggtagtaaaatatattgtgcctacagt

SEQ ID NO: 1068253 - DNA, 33 bp, Homo sapien
ccaaaaagcagtcagacatttggccatctatag

SEQ ID NO: 1068254 - DNA, 33 bp, Homo sapien
ccaaaaagcagtcagatatttggccatctatag

SEQ ID NO: 1068255 - DNA, 33 bp, Homo sapien
ctttcatttcttcccaaagtacaagccagtcca

SEQ ID NO: 1068256 - DNA, 33 bp, Homo sapien
ctttcatttcttcccagagtacaagccagtcca

SEQ ID NO: 1068257 - DNA, 33 bp, Homo sapien
agagaaaattgctgaactacaaatgtgaccttt

SEQ ID NO: 1068258 - DNA, 33 bp, Homo sapien
agagaaaattgctgaagtacaaatgtgaccttt

SEQ ID NO: 1068259 - DNA, 33 bp, Homo sapien
gaagctgacacccaagaagaataggcaaaacca

SEQ ID NO: 1068260 - DNA, 33 bp, Homo sapien
gaagctgacacccaagcagaataggcaaaacca

SEQ ID NO: 1068261 - DNA, 33 bp, Homo sapien
gagtacagagaatctcatttcttgactaagcaa

SEQ ID NO: 1068262 - DNA, 33 bp, Homo sapien
gagtacagagaatctcgtttcttgactaagcaa

SEQ ID NO: 1068263 - DNA, 33 bp, Homo sapien
ttcttagaaataatgacgtactgatatactttt

SEQ ID NO: 1068264 - DNA, 33 bp, Homo sapien
ttcttagaaataatgatgtactgatatactttt

SEQ ID NO: 1068265 - DNA, 33 bp, Homo sapien
tggcagtgatttcaaaattaatggtgcctgagg

SEQ ID NO: 1068266 - DNA, 33 bp, Homo sapien
tggcagtgatttcaaagttaatggtgcctgagg

SEQ ID NO: 1068267 - DNA, 33 bp, Homo sapien
cctacattttaatccacgttgaggtaaatggca

SEQ ID NO: 1068268 - DNA, 33 bp, Homo sapien
cctacattttaatccatgttgaggtaaatggca

SEQ ID NO: 1068269 - DNA, 33 bp, Homo sapien
tttctcttggttcttacactgaatcttgtggtt

SEQ ID NO: 1068270 - DNA, 33 bp, Homo sapien
tttctcttggttcttatactgaatcttgtggtt

SEQ ID NO: 1068271 - DNA, 33 bp, Homo sapien
taagtcacacagataaacaccttaggtctagtc

SEQ ID NO: 1068272 - DNA, 33 bp, Homo sapien
taagtcacacagataatcaccttaggtctagtc

SEQ ID NO: 1068273 - DNA, 33 bp, Homo sapien
gaaatgtgggaaaatacggaaattcctggagac

SEQ ID NO: 1068274 - DNA, 33 bp, Homo sapien
gaaatgtgggaaaatatggaaattcctggagac

SEQ ID NO: 1068275 - DNA, 33 bp, Homo sapien
caagtccaaagtttcacctaagaaaaggcaagt

SEQ ID NO: 1068276 - DNA, 33 bp, Homo sapien
caagtccaaagtttcatctaagaaaaggcaagt

SEQ ID NO: 1068277 - DNA, 33 bp, Homo sapien
tagagagaatttacatcaagttgtgtttgtttt

SEQ ID NO: 1068278 - DNA, 33 bp, Homo sapien
tagagagaatttacattaagttgtgtttgtttt

SEQ ID NO: 1068279 - DNA, 33 bp, Homo sapien
ttcacatttattaaacaacctctctagtagctt

SEQ ID NO: 1068280 - DNA, 33 bp, Homo sapien
ttcacatttattaaaccacctctctagtagctt

SEQ ID NO: 1068281 - DNA, 33 bp, Homo sapien
aattgtcccttcgtcaatacttcaagctattaa

SEQ ID NO: 1068282 - DNA, 33 bp, Homo sapien
aattgtcccttcgtcagtacttcaagctattaa

SEQ ID NO: 1068283 - DNA, 33 bp, Homo sapien
agtttgtgggttattaccgcatgtagtgtacag

SEQ ID NO: 1068284 - DNA, 33 bp, Homo sapien
agtttgtgggttattatcgcatgtagtgtacag

SEQ ID NO: 1068285 - DNA, 33 bp, Homo sapien
cttatagttgcttacaaaataaggtgagatgca

SEQ ID NO: 1068286 - DNA, 33 bp, Homo sapien
cttatagttgcttacagaataaggtgagatgca

SEQ ID NO: 1068287 - DNA, 33 bp, Homo sapien
catcgtaagatatccaagtggaagctgtaagtc

SEQ ID NO: 1068288 - DNA, 33 bp, Homo sapien
catcgtaagatatccacgtggaagctgtaagtc

SEQ ID NO: 1068289 - DNA, 33 bp, Homo sapien
aatagctttagtgcaaactttcttggtccaagt

SEQ ID NO: 1068290 - DNA, 33 bp, Homo sapien
aatagctttagtgcaatctttcttggtccaagt

SEQ ID NO: 1068291 - DNA, 33 bp, Homo sapien
gaatgacaacagtggaggtagagatatagaaga

SEQ ID NO: 1068292 - DNA, 33 bp, Homo sapien
gaatgacaacagtggatgtagagatatagaaga

SEQ ID NO: 1068293 - DNA, 33 bp, Homo sapien
tttattaactcaacaaataagtattttaggatt

SEQ ID NO: 1068294 - DNA, 33 bp, Homo sapien
tttattaactcaacaagtaagtattttaggatt

SEQ ID NO: 1068295 - DNA, 33 bp, Homo sapien
aaaggagtcgtaacaaatgataccacacaaata

SEQ ID NO: 1068296 - DNA, 33 bp, Homo sapien
aaaggagtcgtaacaactgataccacacaaata

SEQ ID NO: 1068297 - DNA, 33 bp, Homo sapien
cagtaaggactgtcataaacgaaatgtgggagt

SEQ ID NO: 1068298 - DNA, 33 bp, Homo sapien
cagtaaggactgtcatcaacgaaatgtgggagt

SEQ ID NO: 1068299 - DNA, 33 bp, Homo sapien
gtttttttaaggcccaatcatgttgtaacattt

SEQ ID NO: 1068300 - DNA, 33 bp, Homo sapien
gtttttttaaggcccagtcatgttgtaacattt

SEQ ID NO: 1068301 - DNA, 33 bp, Homo sapien
tacctcatggtatagaataacatccatgcagag

SEQ ID NO: 1068302 - DNA, 33 bp, Homo sapien
tacctcatggtatagagtaacatccatgcagag

SEQ ID NO: 1068303 - DNA, 33 bp, Homo sapien
taggcccttaaggagaggcagttatgtaaaaat

SEQ ID NO: 1068304 - DNA, 33 bp, Homo sapien
taggcccttaaggagatgcagttatgtaaaaat

SEQ ID NO: 1068305 - DNA, 33 bp, Homo sapien
agttcctggatagaacgaaaagctaagtgttgt

SEQ ID NO: 1068306 - DNA, 33 bp, Homo sapien
agttcctggatagaactaaaagctaagtgttgt

SEQ ID NO: 1068307 - DNA, 33 bp, Homo sapien
tgctggcattcctcaaatatggctatttaagat

SEQ ID NO: 1068308 - DNA, 33 bp, Homo sapien
tgctggcattcctcaagtatggctatttaagat

SEQ ID NO: 1068309 - DNA, 33 bp, Homo sapien
cctcttagccttcttgaagataaaggtctttgc

SEQ ID NO: 1068310 - DNA, 33 bp, Homo sapien
cctcttagccttcttgcagataaaggtctttgc

SEQ ID NO: 1068311 - DNA, 33 bp, Homo sapien
agacaagtggacttaacgctcttcacattttca

SEQ ID NO: 1068312 - DNA, 33 bp, Homo sapien
agacaagtggacttaatgctcttcacattttca

SEQ ID NO: 1068313 - DNA, 33 bp, Homo sapien
tgcagctataataaagcaggcaggagaagatgg

SEQ ID NO: 1068314 - DNA, 33 bp, Homo sapien
tgcagctataataaaggaggcaggagaagatgg

SEQ ID NO: 1068315 - DNA, 33 bp, Homo sapien
attattagctggattaaatagactataagctaa

SEQ ID NO: 1068316 - DNA, 33 bp, Homo sapien
attattagctggattagatagactataagctaa

SEQ ID NO: 1068317 - DNA, 33 bp, Homo sapien
tccaaacggtaggatcaaattcattcttaaggc

SEQ ID NO: 1068318 - DNA, 33 bp, Homo sapien
tccaaacggtaggatcgaattcattcttaaggc

SEQ ID NO: 1068319 - DNA, 33 bp, Homo sapien
aatgaaatatcatttcacatccatagcttggca

SEQ ID NO: 1068320 - DNA, 33 bp, Homo sapien
aatgaaatatcatttcgcatccatagcttggca

SEQ ID NO: 1068321 - DNA, 33 bp, Homo sapien
cataagattccatttacgtgtcactctggaaaa

SEQ ID NO: 1068322 - DNA, 33 bp, Homo sapien
cataagattccatttatgtgtcactctggaaaa

SEQ ID NO: 1068323 - DNA, 33 bp, Homo sapien
ctcttgacagcaaccaataaagattattccttt

SEQ ID NO: 1068324 - DNA, 33 bp, Homo sapien
ctcttgacagcaaccagtaaagattattccttt

SEQ ID NO: 1068325 - DNA, 33 bp, Homo sapien
aggcagaaaactgacacgagaccccttacacct

SEQ ID NO: 1068326 - DNA, 33 bp, Homo sapien
aggcagaaaactgacatgagaccccttacacct

SEQ ID NO: 1068327 - DNA, 33 bp, Homo sapien
ctcctgtccgtggaagaagcttggtttccctga

SEQ ID NO: 1068328 - DNA, 33 bp, Homo sapien
ctcctgtccgtggaaggagcttggtttccctga

SEQ ID NO: 1068329 - DNA, 33 bp, Homo sapien
tctttctcgtacaatcaaatgaagataaagtgt

SEQ ID NO: 1068330 - DNA, 33 bp, Homo sapien
tctttctcgtacaatcgaatgaagataaagtgt

SEQ ID NO: 1068331 - DNA, 33 bp, Homo sapien
ctggaagaatgtcaatcaaaatgtctttataat

SEQ ID NO: 1068332 - DNA, 33 bp, Homo sapien
ctggaagaatgtcaatgaaaatgtctttataat

SEQ ID NO: 1068333 - DNA, 33 bp, Homo sapien
ataagaatttcagttcaaatgaagccaaagtta

SEQ ID NO: 1068334 - DNA, 33 bp, Homo sapien
ataagaatttcagttctaatgaagccaaagtta

SEQ ID NO: 1068335 - DNA, 33 bp, Homo sapien
atgaaaataaagctccacatcacttaccattat

SEQ ID NO: 1068336 - DNA, 33 bp, Homo sapien
atgaaaataaagctccgcatcacttaccattat

SEQ ID NO: 1068337 - DNA, 33 bp, Homo sapien
ggatgataacaaattccacatcaataacgctga

SEQ ID NO: 1068338 - DNA, 33 bp, Homo sapien
ggatgataacaaattctacatcaataacgctga

SEQ ID NO: 1068339 - DNA, 33 bp, Homo sapien
atttgttatcatccacggcaaaaattactcaaa

SEQ ID NO: 1068340 - DNA, 33 bp, Homo sapien
atttgttatcatccactgcaaaaattactcaaa

SEQ ID NO: 1068341 - DNA, 33 bp, Homo sapien
cctcagtactgtgccaaataggtgcaggacaaa

SEQ ID NO: 1068342 - DNA, 33 bp, Homo sapien
cctcagtactgtgccatataggtgcaggacaaa

SEQ ID NO: 1068343 - DNA, 33 bp, Homo sapien
tggtgcttgtatatcacaaccgttattgaacaa

SEQ ID NO: 1068344 - DNA, 33 bp, Homo sapien
tggtgcttgtatatcataaccgttattgaacaa

SEQ ID NO: 1068345 - DNA, 33 bp, Homo sapien
ctcctcagccctgttcgctaaatataacaattt

SEQ ID NO: 1068346 - DNA, 33 bp, Homo sapien
ctcctcagccctgttctctaaatataacaattt

SEQ ID NO: 1068347 - DNA, 33 bp, Homo sapien
gtgtaatactagaaaccagaagaaaattaaata

SEQ ID NO: 1068348 - DNA, 33 bp, Homo sapien
gtgtaatactagaaacgagaagaaaattaaata

SEQ ID NO: 1068349 - DNA, 33 bp, Homo sapien
ggaaatatccaacagactattaacaaaaggact

SEQ ID NO: 1068350 - DNA, 33 bp, Homo sapien
ggaaatatccaacagagtattaacaaaaggact

SEQ ID NO: 1068351 - DNA, 33 bp, Homo sapien
gcattgacaatgatttaaaaggttacagaccaa

SEQ ID NO: 1068352 - DNA, 33 bp, Homo sapien
gcattgacaatgatttgaaaggttacagaccaa

SEQ ID NO: 1068353 - DNA, 33 bp, Homo sapien
aagacactaagacagacattggtcctaagaagt

SEQ ID NO: 1068354 - DNA, 33 bp, Homo sapien
aagacactaagacagatattggtcctaagaagt

SEQ ID NO: 1068355 - DNA, 33 bp, Homo sapien
tgcaagatttgctcaacgtccacaaataaatta

SEQ ID NO: 1068356 - DNA, 33 bp, Homo sapien
tgcaagatttgctcaatgtccacaaataaatta

SEQ ID NO: 1068357 - DNA, 33 bp, Homo sapien
gtacaatgatgaatacaagtagttagagccaaa

SEQ ID NO: 1068358 - DNA, 33 bp, Homo sapien
gtacaatgatgaataccagtagttagagccaaa

SEQ ID NO: 1068359 - DNA, 33 bp, Homo sapien
aggacagaggataacactgatggctcgctcatt

SEQ ID NO: 1068360 - DNA, 33 bp, Homo sapien
aggacagaggataacattgatggctcgctcatt

SEQ ID NO: 1068361 - DNA, 33 bp, Homo sapien
ctccgtattatttctcacatagctttgtaggtt

SEQ ID NO: 1068362 - DNA, 33 bp, Homo sapien
ctccgtattatttctcgcatagctttgtaggtt

SEQ ID NO: 1068363 - DNA, 33 bp, Homo sapien
tgaatgaaagaggcccagacaattaattctttg

SEQ ID NO: 1068364 - DNA, 33 bp, Homo sapien
tgaatgaaagaggcccggacaattaattctttg

SEQ ID NO: 1068365 - DNA, 33 bp, Homo sapien
ttagaaaacatacatcaaaatgaaaaaaaggca

SEQ ID NO: 1068366 - DNA, 33 bp, Homo sapien
ttagaaaacatacatccaaatgaaaaaaaggca

SEQ ID NO: 1068367 - DNA, 33 bp, Homo sapien
ctttaataagaaatgccacagtttatacaattg

SEQ ID NO: 1068368 - DNA, 33 bp, Homo sapien
ctttaataagaaatgctacagtttatacaattg

SEQ ID NO: 1068369 - DNA, 33 bp, Homo sapien
tctcccttaaggtgtcaaagaaattagcattaa

SEQ ID NO: 1068370 - DNA, 33 bp, Homo sapien
tctcccttaaggtgtccaagaaattagcattaa

SEQ ID NO: 1068371 - DNA, 33 bp, Homo sapien
ataaagcaaggtcaaacggaggtagttgaaata

SEQ ID NO: 1068372 - DNA, 33 bp, Homo sapien
ataaagcaaggtcaaatggaggtagttgaaata

SEQ ID NO: 1068373 - DNA, 33 bp, Homo sapien
aaaaattgaaaaattgcatctaattgaacaaaa

SEQ ID NO: 1068374 - DNA, 33 bp, Homo sapien
aaaaattgaaaaattggatctaattgaacaaaa

SEQ ID NO: 1068375 - DNA, 33 bp, Homo sapien
tcagtaagataagagcaaagttgatgctgagaa

SEQ ID NO: 1068376 - DNA, 33 bp, Homo sapien
tcagtaagataagagcgaagttgatgctgagaa

SEQ ID NO: 1068377 - DNA, 33 bp, Homo sapien
gggttgccttctgatacggtttcgctgtgtcct

SEQ ID NO: 1068378 - DNA, 33 bp, Homo sapien
gggttgccttctgatatggtttcgctgtgtcct

SEQ ID NO: 1068379 - DNA, 33 bp, Homo sapien
gagcctgcagaataatcagccaattaaaccatt

SEQ ID NO: 1068380 - DNA, 33 bp, Homo sapien
gagcctgcagaataatgagccaattaaaccatt

SEQ ID NO: 1068381 - DNA, 33 bp, Homo sapien
gatgtaaatagctatgaaacaggatatgacgcc

SEQ ID NO: 1068382 - DNA, 33 bp, Homo sapien
gatgtaaatagctatggaacaggatatgacgcc

SEQ ID NO: 1068383 - DNA, 33 bp, Homo sapien
tcctaattttcaccgacgtatttgtaaatagtt

SEQ ID NO: 1068384 - DNA, 33 bp, Homo sapien
tcctaattttcaccgatgtatttgtaaatagtt

SEQ ID NO: 1068385 - DNA, 33 bp, Homo sapien
agaaatgtcttaagaactgcacgtatacatttt

SEQ ID NO: 1068386 - DNA, 33 bp, Homo sapien
agaaatgtcttaagaattgcacgtatacatttt

SEQ ID NO: 1068387 - DNA, 33 bp, Homo sapien
aaaccccaagaattaaactgcaatacacaatgt

SEQ ID NO: 1068388 - DNA, 33 bp, Homo sapien
aaaccccaagaattaagctgcaatacacaatgt

SEQ ID NO: 1068389 - DNA, 33 bp, Homo sapien
agtccttggttcaggaagaggttggaaatttat

SEQ ID NO: 1068390 - DNA, 33 bp, Homo sapien
agtccttggttcaggatgaggttggaaatttat

SEQ ID NO: 1068391 - DNA, 33 bp, Homo sapien
tggggacaagtcttggaacgaagccttccatcc

SEQ ID NO: 1068392 - DNA, 33 bp, Homo sapien
tggggacaagtcttgggacgaagccttccatcc

SEQ ID NO: 1068393 - DNA, 33 bp, Homo sapien
caaagaactattagggccatgttaaaagaactc

SEQ ID NO: 1068394 - DNA, 33 bp, Homo sapien
caaagaactattagggtcatgttaaaagaactc

SEQ ID NO: 1068395 - DNA, 33 bp, Homo sapien
attgaaaactcatgcgcaacacttgcaacaaag

SEQ ID NO: 1068396 - DNA, 33 bp, Homo sapien
attgaaaactcatgcgtaacacttgcaacaaag

SEQ ID NO: 1068397 - DNA, 33 bp, Homo sapien
agtccagcaaagggataaatatttgtcatgtga

SEQ ID NO: 1068398 - DNA, 33 bp, Homo sapien
agtccagcaaagggattaatatttgtcatgtga

SEQ ID NO: 1068399 - DNA, 33 bp, Homo sapien
aatatatgctgtgtaccagtgacatacttaaat

SEQ ID NO: 1068400 - DNA, 33 bp, Homo sapien
aatatatgctgtgtactagtgacatacttaaat

SEQ ID NO: 1068401 - DNA, 33 bp, Homo sapien
tggttagggaaacaaacggtcaaatgcaattct

SEQ ID NO: 1068402 - DNA, 33 bp, Homo sapien
tggttagggaaacaaatggtcaaatgcaattct

SEQ ID NO: 1068403 - DNA, 33 bp, Homo sapien
attgttgctagcctcaatagagacccattacaa

SEQ ID NO: 1068404 - DNA, 33 bp, Homo sapien
attgttgctagcctcagtagagacccattacaa

SEQ ID NO: 1068405 - DNA, 33 bp, Homo sapien
tttcttaccgcagggaaatccttcttaagttac

SEQ ID NO: 1068406 - DNA, 33 bp, Homo sapien
tttcttaccgcagggagatccttcttaagttac

SEQ ID NO: 1068407 - DNA, 33 bp, Homo sapien
ggcttcataagaacagcaattgtggctatattg

SEQ ID NO: 1068408 - DNA, 33 bp, Homo sapien
ggcttcataagaacaggaattgtggctatattg

SEQ ID NO: 1068409 - DNA, 33 bp, Homo sapien
atttgctagtgatatactaatacgtaggcacac

SEQ ID NO: 1068410 - DNA, 33 bp, Homo sapien
atttgctagtgatatattaatacgtaggcacac

SEQ ID NO: 1068411 - DNA, 33 bp, Homo sapien
tagtcatgtggttgaacggatatttcatattgt

SEQ ID NO: 1068412 - DNA, 33 bp, Homo sapien
tagtcatgtggttgaatggatatttcatattgt

SEQ ID NO: 1068413 - DNA, 33 bp, Homo sapien
caggaaaaagaatgtcacacaaaaatagttata

SEQ ID NO: 1068414 - DNA, 33 bp, Homo sapien
caggaaaaagaatgtcgcacaaaaatagttata

SEQ ID NO: 1068415 - DNA, 33 bp, Homo sapien
gttgagacattaaaacacagactatatggcttt

SEQ ID NO: 1068416 - DNA, 33 bp, Homo sapien
gttgagacattaaaacgcagactatatggcttt

SEQ ID NO: 1068417 - DNA, 33 bp, Homo sapien
atgtaaacattaccacaatcaagacagaaaatt

SEQ ID NO: 1068418 - DNA, 33 bp, Homo sapien
atgtaaacattaccacgatcaagacagaaaatt

SEQ ID NO: 1068419 - DNA, 33 bp, Homo sapien
gtgtttcatattttccaaaacccaaatacttta

SEQ ID NO: 1068420 - DNA, 33 bp, Homo sapien
gtgtttcatattttccgaaacccaaatacttta

SEQ ID NO: 1068421 - DNA, 33 bp, Homo sapien
tattctcaataaaaaacttaactgcaatattac

SEQ ID NO: 1068422 - DNA, 33 bp, Homo sapien
tattctcaataaaaaatttaactgcaatattac

SEQ ID NO: 1068423 - DNA, 33 bp, Homo sapien
aacatgacttgacctgaagtttcaaaatttttg

SEQ ID NO: 1068424 - DNA, 33 bp, Homo sapien
aacatgacttgacctgtagtttcaaaatttttg

SEQ ID NO: 1068425 - DNA, 33 bp, Homo sapien
gtactggtgcaaagaaccatgttgccataagtt

SEQ ID NO: 1068426 - DNA, 33 bp, Homo sapien
gtactggtgcaaagaatcatgttgccataagtt

SEQ ID NO: 1068427 - DNA, 33 bp, Homo sapien
tgtttgtccctgagaaaatcttaaatagatgta

SEQ ID NO: 1068428 - DNA, 33 bp, Homo sapien
tgtttgtccctgagaagatcttaaatagatgta

SEQ ID NO: 1068429 - DNA, 33 bp, Homo sapien
ctgcattgggttatcacaagaattaaaggagaa

SEQ ID NO: 1068430 - DNA, 33 bp, Homo sapien
ctgcattgggttatcagaagaattaaaggagaa

SEQ ID NO: 1068431 - DNA, 33 bp, Homo sapien
aatttgcgcctcatacagggaagaaggctggcc

SEQ ID NO: 1068432 - DNA, 33 bp, Homo sapien
aatttgcgcctcatacggggaagaaggctggcc

SEQ ID NO: 1068433 - DNA, 33 bp, Homo sapien
atatgatcaactgttgaaaaagaatttgtctca

SEQ ID NO: 1068434 - DNA, 33 bp, Homo sapien
atatgatcaactgttggaaaagaatttgtctca

SEQ ID NO: 1068435 - DNA, 33 bp, Homo sapien
tgacagtgtttcaagactagccttttatttgga

SEQ ID NO: 1068436 - DNA, 33 bp, Homo sapien
tgacagtgtttcaagagtagccttttatttgga

SEQ ID NO: 1068437 - DNA, 33 bp, Homo sapien
gataagaagactaacaggacttggtgatacttt

SEQ ID NO: 1068438 - DNA, 33 bp, Homo sapien
gataagaagactaacatgacttggtgatacttt

SEQ ID NO: 1068439 - DNA, 33 bp, Homo sapien
gtccaaggatctgtttcaaaaaggtcctgagaa

SEQ ID NO: 1068440 - DNA, 33 bp, Homo sapien
gtccaaggatctgtttgaaaaaggtcctgagaa

SEQ ID NO: 1068441 - DNA, 33 bp, Homo sapien
aaagacagtttgcaaaataacagagagataagg

SEQ ID NO: 1068442 - DNA, 33 bp, Homo sapien
aaagacagtttgcaaagtaacagagagataagg

SEQ ID NO: 1068443 - DNA, 33 bp, Homo sapien
tagccagctttgagaacttccttgagaacattg

SEQ ID NO: 1068444 - DNA, 33 bp, Homo sapien
tagccagctttgagaatttccttgagaacattg

SEQ ID NO: 1068445 - DNA, 33 bp, Homo sapien
gataaaatgatataaaagaaaggatagcaacat

SEQ ID NO: 1068446 - DNA, 33 bp, Homo sapien
gataaaatgatataaaggaaaggatagcaacat

SEQ ID NO: 1068447 - DNA, 33 bp, Homo sapien
caagtcctgagccaagcatgtgtatagctgcgt

SEQ ID NO: 1068448 - DNA, 33 bp, Homo sapien
caagtcctgagccaagtatgtgtatagctgcgt

SEQ ID NO: 1068449 - DNA, 33 bp, Homo sapien
ctttgttttacagacactgcattttctatttat

SEQ ID NO: 1068450 - DNA, 33 bp, Homo sapien
ctttgttttacagacagtgcattttctatttat

SEQ ID NO: 1068451 - DNA, 33 bp, Homo sapien
taaagatgcaattcataaattctaatttgaagc

SEQ ID NO: 1068452 - DNA, 33 bp, Homo sapien
taaagatgcaattcatcaattctaatttgaagc

SEQ ID NO: 1068453 - DNA, 33 bp, Homo sapien
agaaagagataaagggcatcaaagtcgatatag

SEQ ID NO: 1068454 - DNA, 33 bp, Homo sapien
agaaagagataaagggtatcaaagtcgatatag

SEQ ID NO: 1068455 - DNA, 33 bp, Homo sapien
gcatcttttcaaattaactacaactcagtgagt

SEQ ID NO: 1068456 - DNA, 33 bp, Homo sapien
gcatcttttcaaattacctacaactcagtgagt

SEQ ID NO: 1068457 - DNA, 33 bp, Homo sapien
aattttctacattttcacttttcatgcagctgg

SEQ ID NO: 1068458 - DNA, 33 bp, Homo sapien
aattttctacattttcgcttttcatgcagctgg

SEQ ID NO: 1068459 - DNA, 33 bp, Homo sapien
aaactatcctctattcaacaaatcttgctgggg

SEQ ID NO: 1068460 - DNA, 33 bp, Homo sapien
aaactatcctctattcgacaaatcttgctgggg

SEQ ID NO: 1068461 - DNA, 33 bp, Homo sapien
tggaactacagggtcacgatttaattcctggaa

SEQ ID NO: 1068462 - DNA, 33 bp, Homo sapien
tggaactacagggtcatgatttaattcctggaa

SEQ ID NO: 1068463 - DNA, 33 bp, Homo sapien
ttaacaaaaaattgacaaagagatcagcagaac

SEQ ID NO: 1068464 - DNA, 33 bp, Homo sapien
ttaacaaaaaattgacgaagagatcagcagaac

SEQ ID NO: 1068465 - DNA, 33 bp, Homo sapien
gaagttttgcacaatacggtcctaattcaccat

SEQ ID NO: 1068466 - DNA, 33 bp, Homo sapien
gaagttttgcacaatatggtcctaattcaccat

SEQ ID NO: 1068467 - DNA, 33 bp, Homo sapien
gagtgtgtacagtagaagtaaatgatgagactt

SEQ ID NO: 1068468 - DNA, 33 bp, Homo sapien
gagtgtgtacagtagaggtaaatgatgagactt

SEQ ID NO: 1068469 - DNA, 33 bp, Homo sapien
acaaaggctcataagacgctacaaccatcaatt

SEQ ID NO: 1068470 - DNA, 33 bp, Homo sapien
acaaaggctcataagatgctacaaccatcaatt

SEQ ID NO: 1068471 - DNA, 33 bp, Homo sapien
ctgcaatcactgaaaaaccaagtattgcctagg

SEQ ID NO: 1068472 - DNA, 33 bp, Homo sapien
ctgcaatcactgaaaagccaagtattgcctagg

SEQ ID NO: 1068473 - DNA, 33 bp, Homo sapien
actctgctcttccatgaaacaaggactactgaa

SEQ ID NO: 1068474 - DNA, 33 bp, Homo sapien
actctgctcttccatgtaacaaggactactgaa

SEQ ID NO: 1068475 - DNA, 33 bp, Homo sapien
taatgcatttctggcaataaaggagaataaaac

SEQ ID NO: 1068476 - DNA, 33 bp, Homo sapien
taatgcatttctggcagtaaaggagaataaaac

SEQ ID NO: 1068477 - DNA, 33 bp, Homo sapien
ctatcagcatttcgggaaaagccattcaacaaa

SEQ ID NO: 1068478 - DNA, 33 bp, Homo sapien
ctatcagcatttcgggcaaagccattcaacaaa

SEQ ID NO: 1068479 - DNA, 33 bp, Homo sapien
tgacctgaagtctctcactcaaatttgtctaaa

SEQ ID NO: 1068480 - DNA, 33 bp, Homo sapien
tgacctgaagtctctccctcaaatttgtctaaa

SEQ ID NO: 1068481 - DNA, 33 bp, Homo sapien
atctatgtatctagcacctataggaaacaaaca

SEQ ID NO: 1068482 - DNA, 33 bp, Homo sapien
atctatgtatctagcatctataggaaacaaaca

SEQ ID NO: 1068483 - DNA, 33 bp, Homo sapien
ttattgtcattaacacacaaacccatcttagtg

SEQ ID NO: 1068484 - DNA, 33 bp, Homo sapien
ttattgtcattaacacgcaaacccatcttagtg

SEQ ID NO: 1068485 - DNA, 33 bp, Homo sapien
atacaccatttgtccaatgaatccactttttgt

SEQ ID NO: 1068486 - DNA, 33 bp, Homo sapien
atacaccatttgtccattgaatccactttttgt

SEQ ID NO: 1068487 - DNA, 33 bp, Homo sapien
gtctattgccctcaaaatgttctcaacaggaaa

SEQ ID NO: 1068488 - DNA, 33 bp, Homo sapien
gtctattgccctcaaagtgttctcaacaggaaa

SEQ ID NO: 1068489 - DNA, 33 bp, Homo sapien
tcccctttggtgtcaactgcctgtgtttccatg

SEQ ID NO: 1068490 - DNA, 33 bp, Homo sapien
tcccctttggtgtcaattgcctgtgtttccatg

SEQ ID NO: 1068491 - DNA, 33 bp, Homo sapien
atacactcacaggtacactttacaattcaaact

SEQ ID NO: 1068492 - DNA, 33 bp, Homo sapien
atacactcacaggtacgctttacaattcaaact

SEQ ID NO: 1068493 - DNA, 33 bp, Homo sapien
gaactaagccagatgcactcccttaggctattc

SEQ ID NO: 1068494 - DNA, 33 bp, Homo sapien
gaactaagccagatgctctcccttaggctattc

SEQ ID NO: 1068495 - DNA, 33 bp, Homo sapien
gaggattaatttctagccccacttcccaatctt

SEQ ID NO: 1068496 - DNA, 33 bp, Homo sapien
gaggattaatttctaggcccacttcccaatctt

SEQ ID NO: 1068497 - DNA, 33 bp, Homo sapien
gtgcaactataaagtcacctaactaactttgtt

SEQ ID NO: 1068498 - DNA, 33 bp, Homo sapien
gtgcaactataaagtcgcctaactaactttgtt

SEQ ID NO: 1068499 - DNA, 33 bp, Homo sapien
aaacacaatttttttacgaagacagaagtagaa

SEQ ID NO: 1068500 - DNA, 33 bp, Homo sapien
aaacacaatttttttaggaagacagaagtagaa

SEQ ID NO: 1068501 - DNA, 33 bp, Homo sapien
tgcaaatcacaactacaatgaactatcatccca

SEQ ID NO: 1068502 - DNA, 33 bp, Homo sapien
tgcaaatcacaactactatgaactatcatccca

SEQ ID NO: 1068503 - DNA, 33 bp, Homo sapien
aaatctaataagctaaacaggatgtttcctcta

SEQ ID NO: 1068504 - DNA, 33 bp, Homo sapien
aaatctaataagctaatcaggatgtttcctcta

SEQ ID NO: 1068505 - DNA, 33 bp, Homo sapien
gcctccttaattgaaactatatgatggaatcta

SEQ ID NO: 1068506 - DNA, 33 bp, Homo sapien
gcctccttaattgaaagtatatgatggaatcta

SEQ ID NO: 1068507 - DNA, 33 bp, Homo sapien
tgttgttgtatagtaacgctacagatttttgta

SEQ ID NO: 1068508 - DNA, 33 bp, Homo sapien
tgttgttgtatagtaatgctacagatttttgta

SEQ ID NO: 1068509 - DNA, 33 bp, Homo sapien
aaacaaataatgaaaactttggtgaacattcat

SEQ ID NO: 1068510 - DNA, 33 bp, Homo sapien
aaacaaataatgaaaattttggtgaacattcat

SEQ ID NO: 1068511 - DNA, 33 bp, Homo sapien
aacaacaataaaataccaccttgtaccagtcag

SEQ ID NO: 1068512 - DNA, 33 bp, Homo sapien
aacaacaataaaatactaccttgtaccagtcag

SEQ ID NO: 1068513 - DNA, 33 bp, Homo sapien
ttaacctaatctacacaacggtggcctagaaat

SEQ ID NO: 1068514 - DNA, 33 bp, Homo sapien
ttaacctaatctacactacggtggcctagaaat

SEQ ID NO: 1068515 - DNA, 33 bp, Homo sapien
tatctgctttgctgagacaaatggaattttagc

SEQ ID NO: 1068516 - DNA, 33 bp, Homo sapien
tatctgctttgctgaggcaaatggaattttagc

SEQ ID NO: 1068517 - DNA, 33 bp, Homo sapien
tggatctgtaagtccacaagaaagttatacagt

SEQ ID NO: 1068518 - DNA, 33 bp, Homo sapien
tggatctgtaagtccagaagaaagttatacagt

SEQ ID NO: 1068519 - DNA, 33 bp, Homo sapien
aggtccatcagaactcacttccaggtatggaag

SEQ ID NO: 1068520 - DNA, 33 bp, Homo sapien
aggtccatcagaactcgcttccaggtatggaag

SEQ ID NO: 1068521 - DNA, 33 bp, Homo sapien
tgagcttatatgtatgcagtcattgttcttggg

SEQ ID NO: 1068522 - DNA, 33 bp, Homo sapien
tgagcttatatgtatgtagtcattgttcttggg

SEQ ID NO: 1068523 - DNA, 33 bp, Homo sapien
tattcactttactgtaccagtctggaaccaaat

SEQ ID NO: 1068524 - DNA, 33 bp, Homo sapien
tattcactttactgtagcagtctggaaccaaat

SEQ ID NO: 1068525 - DNA, 33 bp, Homo sapien
gcacacatggagtgaacaatctcatggtaatac

SEQ ID NO: 1068526 - DNA, 33 bp, Homo sapien
gcacacatggagtgaagaatctcatggtaatac

SEQ ID NO: 1068527 - DNA, 33 bp, Homo sapien
ttatatataaaagaccacaatatacaaattgaa

SEQ ID NO: 1068528 - DNA, 33 bp, Homo sapien
ttatatataaaagaccgcaatatacaaattgaa

SEQ ID NO: 1068529 - DNA, 33 bp, Homo sapien
ctttgtgtgctatatacgtaacaagtatctgtt

SEQ ID NO: 1068530 - DNA, 33 bp, Homo sapien
ctttgtgtgctatatatgtaacaagtatctgtt

SEQ ID NO: 1068531 - DNA, 33 bp, Homo sapien
tcgtataatttctgccacaaccaactttctact

SEQ ID NO: 1068532 - DNA, 33 bp, Homo sapien
tcgtataatttctgccgcaaccaactttctact

SEQ ID NO: 1068533 - DNA, 33 bp, Homo sapien
tcttaagcatactgacgctgaagccatgccctc

SEQ ID NO: 1068534 - DNA, 33 bp, Homo sapien
tcttaagcatactgactctgaagccatgccctc

SEQ ID NO: 1068535 - DNA, 33 bp, Homo sapien
cccatacatcttgtaactggtggagctggtatt

SEQ ID NO: 1068536 - DNA, 33 bp, Homo sapien
cccatacatcttgtaagtggtggagctggtatt

SEQ ID NO: 1068537 - DNA, 33 bp, Homo sapien
tgggggctctcaaaacagcagccgcataactct

SEQ ID NO: 1068538 - DNA, 33 bp, Homo sapien
tgggggctctcaaaacggcagccgcataactct

SEQ ID NO: 1068539 - DNA, 33 bp, Homo sapien
ctgtaaagatcttttcaactctgatgtattgca

SEQ ID NO: 1068540 - DNA, 33 bp, Homo sapien
ctgtaaagatcttttcgactctgatgtattgca

SEQ ID NO: 1068541 - DNA, 33 bp, Homo sapien
gctgtttttgtgtaaaagacaaatgtctgacaa

SEQ ID NO: 1068542 - DNA, 33 bp, Homo sapien
gctgtttttgtgtaaacgacaaatgtctgacaa

SEQ ID NO: 1068543 - DNA, 33 bp, Homo sapien
cattcctccttctaaactcctgattgtaaatta

SEQ ID NO: 1068544 - DNA, 33 bp, Homo sapien
cattcctccttctaaattcctgattgtaaatta

SEQ ID NO: 1068545 - DNA, 33 bp, Homo sapien
cctaggttattgcaacagctcttaaacagtctt

SEQ ID NO: 1068546 - DNA, 33 bp, Homo sapien
cctaggttattgcaacggctcttaaacagtctt

SEQ ID NO: 1068547 - DNA, 33 bp, Homo sapien
gactttatagtgaagacgatggggagccattag

SEQ ID NO: 1068548 - DNA, 33 bp, Homo sapien
gactttatagtgaagatgatggggagccattag

SEQ ID NO: 1068549 - DNA, 33 bp, Homo sapien
atataacatttggaaaattataggcactcagta

SEQ ID NO: 1068550 - DNA, 33 bp, Homo sapien
atataacatttggaaagttataggcactcagta

SEQ ID NO: 1068551 - DNA, 33 bp, Homo sapien
ccagttgagactgaaactggggaggcttatttg

SEQ ID NO: 1068552 - DNA, 33 bp, Homo sapien
ccagttgagactgaaattggggaggcttatttg

SEQ ID NO: 1068553 - DNA, 33 bp, Homo sapien
aacaagaccaacttgaaagctgaaaatcggtag

SEQ ID NO: 1068554 - DNA, 33 bp, Homo sapien
aacaagaccaacttgagagctgaaaatcggtag

SEQ ID NO: 1068555 - DNA, 33 bp, Homo sapien
gtgaaataggcacttacgcaattattctaatgc

SEQ ID NO: 1068556 - DNA, 33 bp, Homo sapien
gtgaaataggcacttatgcaattattctaatgc

SEQ ID NO: 1068557 - DNA, 33 bp, Homo sapien
acattgttgtatagaagaacgttcagtttttcc

SEQ ID NO: 1068558 - DNA, 33 bp, Homo sapien
acattgttgtatagaataacgttcagtttttcc

SEQ ID NO: 1068559 - DNA, 33 bp, Homo sapien
gaaagagagagcaaaacgggttatttaggtccc

SEQ ID NO: 1068560 - DNA, 33 bp, Homo sapien
gaaagagagagcaaaatgggttatttaggtccc

SEQ ID NO: 1068561 - DNA, 33 bp, Homo sapien
atgacaataaattgaccgataccctttgagaaa

SEQ ID NO: 1068562 - DNA, 33 bp, Homo sapien
atgacaataaattgacggataccctttgagaaa

SEQ ID NO: 1068563 - DNA, 33 bp, Homo sapien
gtggtgttggcctgtagattgggtgtgcaggtg

SEQ ID NO: 1068564 - DNA, 33 bp, Homo sapien
gtggtgttggcctgtatattgggtgtgcaggtg

SEQ ID NO: 1068565 - DNA, 33 bp, Homo sapien
gagggatctatatgaccaaatgcaaaaggaact

SEQ ID NO: 1068566 - DNA, 33 bp, Homo sapien
gagggatctatatgactaaatgcaaaaggaact

SEQ ID NO: 1068567 - DNA, 33 bp, Homo sapien
ttttaaggccttccaaatgattggatgaagcct

SEQ ID NO: 1068568 - DNA, 33 bp, Homo sapien
ttttaaggccttccaactgattggatgaagcct

SEQ ID NO: 1068569 - DNA, 33 bp, Homo sapien
gtccggctgctctacaaatttcagatgtgctag

SEQ ID NO: 1068570 - DNA, 33 bp, Homo sapien
gtccggctgctctacagatttcagatgtgctag

SEQ ID NO: 1068571 - DNA, 33 bp, Homo sapien
aaggatatttttgtaacgcaccaaagcacactt

SEQ ID NO: 1068572 - DNA, 33 bp, Homo sapien
aaggatatttttgtaatgcaccaaagcacactt

SEQ ID NO: 1068573 - DNA, 33 bp, Homo sapien
aggtgaaaatggaggcgaaagggaaatataggg

SEQ ID NO: 1068574 - DNA, 33 bp, Homo sapien
aggtgaaaatggaggctaaagggaaatataggg

SEQ ID NO: 1068575 - DNA, 33 bp, Homo sapien
atagacttagtaaggaaaatatctatgactgat

SEQ ID NO: 1068576 - DNA, 33 bp, Homo sapien
atagacttagtaaggacaatatctatgactgat

SEQ ID NO: 1068577 - DNA, 33 bp, Homo sapien
ccttaactagtttgcaactgaaatgtctgtaag

SEQ ID NO: 1068578 - DNA, 33 bp, Homo sapien
ccttaactagtttgcacctgaaatgtctgtaag

SEQ ID NO: 1068579 - DNA, 33 bp, Homo sapien
aaaaacatgatgacaggcgtaagctggagcaga

SEQ ID NO: 1068580 - DNA, 33 bp, Homo sapien
aaaaacatgatgacagtcgtaagctggagcaga

SEQ ID NO: 1068581 - DNA, 33 bp, Homo sapien
catgtaaccctaaaaacgaatgtggattcttac

SEQ ID NO: 1068582 - DNA, 33 bp, Homo sapien
catgtaaccctaaaaatgaatgtggattcttac

SEQ ID NO: 1068583 - DNA, 33 bp, Homo sapien
tagggttacatgttccaatgaacaaagaagtta

SEQ ID NO: 1068584 - DNA, 33 bp, Homo sapien
tagggttacatgttccgatgaacaaagaagtta

SEQ ID NO: 1068585 - DNA, 33 bp, Homo sapien
tctcttggcttagagacgcacttgaggtatcaa

SEQ ID NO: 1068586 - DNA, 33 bp, Homo sapien
tctcttggcttagagatgcacttgaggtatcaa

SEQ ID NO: 1068587 - DNA, 33 bp, Homo sapien
tctacacacctggacccagcatacttggcaaga

SEQ ID NO: 1068588 - DNA, 33 bp, Homo sapien
tctacacacctggacctagcatacttggcaaga

SEQ ID NO: 1068589 - DNA, 33 bp, Homo sapien
cttgctggttttgataacttctttagttgaact

SEQ ID NO: 1068590 - DNA, 33 bp, Homo sapien
cttgctggttttgataccttctttagttgaact

SEQ ID NO: 1068591 - DNA, 33 bp, Homo sapien
cagtttgatggaagacaattaagctgaacaatt

SEQ ID NO: 1068592 - DNA, 33 bp, Homo sapien
cagtttgatggaagacgattaagctgaacaatt

SEQ ID NO: 1068593 - DNA, 33 bp, Homo sapien
ccattctaacaatatcaatttttcctatccatg

SEQ ID NO: 1068594 - DNA, 33 bp, Homo sapien
ccattctaacaatatcgatttttcctatccatg

SEQ ID NO: 1068595 - DNA, 33 bp, Homo sapien; identical to SEQ ID NO: 1068593

SEQ ID NO: 1068596 - DNA, 33 bp, Homo sapien; identical to SEQ ID NO: 1068594

SEQ ID NO: 1068597 - DNA, 33 bp, Homo sapien
tagcccctgtgggtaacacaacagtgagtaagt

SEQ ID NO: 1068598 - DNA, 33 bp, Homo sapien
tagcccctgtgggtaatacaacagtgagtaagt

SEQ ID NO: 1068599 - DNA, 33 bp, Homo sapien
gagtgcttttgtaaaacagtaatgctgttgcaa

SEQ ID NO: 1068600 - DNA, 33 bp, Homo sapien
gagtgcttttgtaaaatagtaatgctgttgcaa

SEQ ID NO: 1068601 - DNA, 33 bp, Homo sapien
aaagctaccagtctcaaagcatattttccctca

SEQ ID NO: 1068602 - DNA, 33 bp, Homo sapien
aaagctaccagtctcagagcatattttccctca

SEQ ID NO: 1068603 - DNA, 33 bp, Homo sapien
gttactgttaaaccaccgtattttcaaatattc

SEQ ID NO: 1068604 - DNA, 33 bp, Homo sapien
gttactgttaaaccactgtattttcaaatattc

SEQ ID NO: 1068605 - DNA, 33 bp, Homo sapien
aatgcctcgcactttgcaaatattcaataaatg

SEQ ID NO: 1068606 - DNA, 33 bp, Homo sapien
aatgcctcgcactttgtaaatattcaataaatg

SEQ ID NO: 1068607 - DNA, 33 bp, Homo sapien
tataggcacttcgaaacataactcttaagaatt

SEQ ID NO: 1068608 - DNA, 33 bp, Homo sapien
tataggcacttcgaaatataactcttaagaatt

SEQ ID NO: 1068609 - DNA, 33 bp, Homo sapien
attctgtgtgactaataactgtgaaattgatta

SEQ ID NO: 1068610 - DNA, 33 bp, Homo sapien
attctgtgtgactaatgactgtgaaattgatta

SEQ ID NO: 1068611 - DNA, 33 bp, Homo sapien
gtattttgttttaccacggcttgatgactactt

SEQ ID NO: 1068612 - DNA, 33 bp, Homo sapien
gtattttgttttaccagggcttgatgactactt

SEQ ID NO: 1068613 - DNA, 33 bp, Homo sapien
gattcatctgggatgaccaatgatctgtgtgat

SEQ ID NO: 1068614 - DNA, 33 bp, Homo sapien
gattcatctgggatgatcaatgatctgtgtgat

SEQ ID NO: 1068615 - DNA, 33 bp, Homo sapien
taaccttttggacttagagcatgactttgcaga

SEQ ID NO: 1068616 - DNA, 33 bp, Homo sapien
taaccttttggacttatagcatgactttgcaga

SEQ ID NO: 1068617 - DNA, 33 bp, Homo sapien
atcctagtggtccaaacgtaactttttgcaaac

SEQ ID NO: 1068618 - DNA, 33 bp, Homo sapien
atcctagtggtccaaatgtaactttttgcaaac

SEQ ID NO: 1068619 - DNA, 33 bp, Homo sapien
actccagacttgtacacgtggcttgatttggcc

SEQ ID NO: 1068620 - DNA, 33 bp, Homo sapien
actccagacttgtacatgtggcttgatttggcc

SEQ ID NO: 1068621 - DNA, 33 bp, Homo sapien
tttttcattcaatgcaacagtcttatagtagag

SEQ ID NO: 1068622 - DNA, 33 bp, Homo sapien
tttttcattcaatgcagcagtcttatagtagag

SEQ ID NO: 1068623 - DNA, 33 bp, Homo sapien
ctgagctgaaaggtcactaccaaggcagataca

SEQ ID NO: 1068624 - DNA, 33 bp, Homo sapien
ctgagctgaaaggtcattaccaaggcagataca

SEQ ID NO: 1068625 - DNA, 33 bp, Homo sapien
aatagaaagcaaatccacatacttattggcctc

SEQ ID NO: 1068626 - DNA, 33 bp, Homo sapien
aatagaaagcaaatccgcatacttattggcctc

SEQ ID NO: 1068627 - DNA, 33 bp, Homo sapien
agcctagaactatacccaactcataatggctat

SEQ ID NO: 1068628 - DNA, 33 bp, Homo sapien
agcctagaactatacctaactcataatggctat

SEQ ID NO: 1068629 - DNA, 33 bp, Homo sapien
atcagccaaattacccaaggcgtctctacatcc

SEQ ID NO: 1068630 - DNA, 33 bp, Homo sapien
atcagccaaattacccgaggcgtctctacatcc

SEQ ID NO: 1068631 - DNA, 33 bp, Homo sapien
gcataatggtaaaaaaagctaagaagatataat

SEQ ID NO: 1068632 - DNA, 33 bp, Homo sapien
gcataatggtaaaaaacgctaagaagatataat

SEQ ID NO: 1068633 - DNA, 33 bp, Homo sapien
ttttttaatagtagccacactaatggatgtaat

SEQ ID NO: 1068634 - DNA, 33 bp, Homo sapien
ttttttaatagtagccgcactaatggatgtaat

SEQ ID NO: 1068635 - DNA, 33 bp, Homo sapien
cttaaatactgtatcaactctctgtttcattct

SEQ ID NO: 1068636 - DNA, 33 bp, Homo sapien
cttaaatactgtatcacctctctgtttcattct

SEQ ID NO: 1068637 - DNA, 33 bp, Homo sapien
actttaaagttagggaacttgaggcacaaaatt

SEQ ID NO: 1068638 - DNA, 33 bp, Homo sapien
actttaaagttagggaccttgaggcacaaaatt

SEQ ID NO: 1068639 - DNA, 33 bp, Homo sapien
ccaactttggtagttcaaaaactatgatctctg

SEQ ID NO: 1068640 - DNA, 33 bp, Homo sapien
ccaactttggtagttcgaaaactatgatctctg

SEQ ID NO: 1068641 - DNA, 33 bp, Homo sapien
aatgtagtgtttaagaacttagaacattatcac

SEQ ID NO: 1068642 - DNA, 33 bp, Homo sapien
aatgtagtgtttaagagcttagaacattatcac

SEQ ID NO: 1068643 - DNA, 33 bp, Homo sapien
tagagaaaatactaaccgagaggaagcagcagt

SEQ ID NO: 1068644 - DNA, 33 bp, Homo sapien
tagagaaaatactaactgagaggaagcagcagt

SEQ ID NO: 1068645 - DNA, 33 bp, Homo sapien
gggccagaattttagaagatagaattccataac

SEQ ID NO: 1068646 - DNA, 33 bp, Homo sapien
gggccagaattttagacgatagaattccataac

SEQ ID NO: 1068647 - DNA, 33 bp, Homo sapien
gatactgcttaactacacttccaaatacctcca

SEQ ID NO: 1068648 - DNA, 33 bp, Homo sapien
gatactgcttaactacgcttccaaatacctcca

SEQ ID NO: 1068649 - DNA, 33 bp, Homo sapien
catttcctgaattataacccgtcaggtactcag

SEQ ID NO: 1068650 - DNA, 33 bp, Homo sapien
catttcctgaattatatcccgtcaggtactcag

SEQ ID NO: 1068651 - DNA, 33 bp, Homo sapien
tgcctttctaatgataacattttaagcttgtac

SEQ ID NO: 1068652 - DNA, 33 bp, Homo sapien
tgcctttctaatgatagcattttaagcttgtac

SEQ ID NO: 1068653 - DNA, 33 bp, Homo sapien
atgccagactgtactcggagatccctagacctc

SEQ ID NO: 1068654 - DNA, 33 bp, Homo sapien
atgccagactgtactctgagatccctagacctc

SEQ ID NO: 1068655 - DNA, 33 bp, Homo sapien
cacataaggacagcaaacagaaactcattgtat

SEQ ID NO: 1068656 - DNA, 33 bp, Homo sapien
cacataaggacagcaagcagaaactcattgtat

SEQ ID NO: 1068657 - DNA, 33 bp, Homo sapien
caagttccctttcatacgacctcctgctaggga

SEQ ID NO: 1068658 - DNA, 33 bp, Homo sapien
caagttccctttcatatgacctcctgctaggga

SEQ ID NO: 1068659 - DNA, 33 bp, Homo sapien
ttagtgacagtcagggaagatctgagtctttta

SEQ ID NO: 1068660 - DNA, 33 bp, Homo sapien
ttagtgacagtcaggggagatctgagtctttta

SEQ ID NO: 1068661 - DNA, 33 bp, Homo sapien
agggtgctttttaggcccttttatatcgagata

SEQ ID NO: 1068662 - DNA, 33 bp, Homo sapien
agggtgctttttaggctcttttatatcgagata

SEQ ID NO: 1068663 - DNA, 33 bp, Homo sapien
ctttgtatcttgctacaaatcgtaacttatata

SEQ ID NO: 1068664 - DNA, 33 bp, Homo sapien
ctttgtatcttgctactaatcgtaacttatata

SEQ ID NO: 1068665 - DNA, 33 bp, Homo sapien
tgccagatgaatgacacggacagaagggttctg

SEQ ID NO: 1068666 - DNA, 33 bp, Homo sapien
tgccagatgaatgacatggacagaagggttctg

SEQ ID NO: 1068667 - DNA, 33 bp, Homo sapien
ttatgaatgtttcaaccggctagatttgaactc

SEQ ID NO: 1068668 - DNA, 33 bp, Homo sapien
ttatgaatgtttcaactggctagatttgaactc

SEQ ID NO: 1068669 - DNA, 33 bp, Homo sapien
ataataagagctaaaagtcattgagcatggggt

SEQ ID NO: 1068670 - DNA, 33 bp, Homo sapien
ataataagagctaaaattcattgagcatggggt

SEQ ID NO: 1068671 - DNA, 33 bp, Homo sapien
gctgtcctgctttgtcaactccacaaacgatct

SEQ ID NO: 1068672 - DNA, 33 bp, Homo sapien
gctgtcctgctttgtcgactccacaaacgatct

SEQ ID NO: 1068673 - DNA, 33 bp, Homo sapien
actggtgcaagagacacccatttgtcaaacagg

SEQ ID NO: 1068674 - DNA, 33 bp, Homo sapien
actggtgcaagagacatccatttgtcaaacagg

SEQ ID NO: 1068675 - DNA, 33 bp, Homo sapien
aaagtataaaagaataacatcaaagacctaagc

SEQ ID NO: 1068676 - DNA, 33 bp, Homo sapien
aaagtataaaagaatatcatcaaagacctaagc

SEQ ID NO: 1068677 - DNA, 33 bp, Homo sapien
ttctccatccttatcacctggctttcacctata

SEQ ID NO: 1068678 - DNA, 33 bp, Homo sapien
ttctccatccttatcatctggctttcacctata

SEQ ID NO: 1068679 - DNA, 33 bp, Homo sapien
ggcatctgatatgaaactctaaaacctgctcag

SEQ ID NO: 1068680 - DNA, 33 bp, Homo sapien
ggcatctgatatgaaattctaaaacctgctcag

SEQ ID NO: 1068681 - DNA, 33 bp, Homo sapien
accaataataacttcaaaatagctggtactaat

SEQ ID NO: 1068682 - DNA, 33 bp, Homo sapien
accaataataacttcagaatagctggtactaat

SEQ ID NO: 1068683 - DNA, 33 bp, Homo sapien
catgagagctcacagcggaattatattatctaa

SEQ ID NO: 1068684 - DNA, 33 bp, Homo sapien
catgagagctcacagctgaattatattatctaa

SEQ ID NO: 1068685 - DNA, 33 bp, Homo sapien
agtggggtggctagaacaaaatgttagagcttt

SEQ ID NO: 1068686 - DNA, 33 bp, Homo sapien
agtggggtggctagaagaaaatgttagagcttt

SEQ ID NO: 1068687 - DNA, 33 bp, Homo sapien
agagagatgttttgcccatgggacagaggttgc

SEQ ID NO: 1068688 - DNA, 33 bp, Homo sapien
agagagatgttttgcctatgggacagaggttgc

SEQ ID NO: 1068689 - DNA, 33 bp, Homo sapien
aaaattgaggccagacgctccctatcatctcag

SEQ ID NO: 1068690 - DNA, 33 bp, Homo sapien
aaaattgaggccagactctccctatcatctcag

SEQ ID NO: 1068691 - DNA, 33 bp, Homo sapien
tctcctaatattaacagtcctagcataccactg

SEQ ID NO: 1068692 - DNA, 33 bp, Homo sapien
tctcctaatattaacattcctagcataccactg

SEQ ID NO: 1068693 - DNA, 33 bp, Homo sapien
cctcctgctctttagcccaaaaccatctcttgc

SEQ ID NO: 1068694 - DNA, 33 bp, Homo sapien
cctcctgctctttagctcaaaaccatctcttgc

SEQ ID NO: 1068695 - DNA, 33 bp, Homo sapien
cccctcttctggctaccatgaaatacacaatac

SEQ ID NO: 1068696 - DNA, 33 bp, Homo sapien
cccctcttctggctactatgaaatacacaatac

SEQ ID NO: 1068697 - DNA, 33 bp, Homo sapien
cctggaaagacattgaaaggatcatgattgtgg

SEQ ID NO: 1068698 - DNA, 33 bp, Homo sapien
cctggaaagacattgagaggatcatgattgtgg

SEQ ID NO: 1068699 - DNA, 33 bp, Homo sapien
gttctaaacgacaatgaagtagatcaccaacca

SEQ ID NO: 1068700 - DNA, 33 bp, Homo sapien
gttctaaacgacaatggagtagatcaccaacca

SEQ ID NO: 1068701 - DNA, 33 bp, Homo sapien
agatgcagtaagaccaccgttggcttttcccat

SEQ ID NO: 1068702 - DNA, 33 bp, Homo sapien
agatgcagtaagaccatcgttggcttttcccat

SEQ ID NO: 1068703 - DNA, 33 bp, Homo sapien
tacagatgccttaacacgtgctgcattagagac

SEQ ID NO: 1068704 - DNA, 33 bp, Homo sapien
tacagatgccttaacatgtgctgcattagagac

SEQ ID NO: 1068705 - DNA, 33 bp, Homo sapien
gacataacccttagcacgtcagaaactataaca

SEQ ID NO: 1068706 - DNA, 33 bp, Homo sapien
gacataacccttagcatgtcagaaactataaca

SEQ ID NO: 1068707 - DNA, 33 bp, Homo sapien
ggaatagctaaagatgaatcaactaggagatga

SEQ ID NO: 1068708 - DNA, 33 bp, Homo sapien
ggaatagctaaagatggatcaactaggagatga

SEQ ID NO: 1068709 - DNA, 33 bp, Homo sapien
tgttataactgttttaaacacatctattgagat

SEQ ID NO: 1068710 - DNA, 33 bp, Homo sapien
tgttataactgttttacacacatctattgagat

SEQ ID NO: 1068711 - DNA, 33 bp, Homo sapien
tcatctcccaaacataaggatcctggcttctgc

SEQ ID NO: 1068712 - DNA, 33 bp, Homo sapien
tcatctcccaaacatacggatcctggcttctgc

SEQ ID NO: 1068713 - DNA, 33 bp, Homo sapien
ggttttgtttctgttcaacggtggtaataaaaa

SEQ ID NO: 1068714 - DNA, 33 bp, Homo sapien
ggttttgtttctgttcgacggtggtaataaaaa

SEQ ID NO: 1068715 - DNA, 33 bp, Homo sapien
ctttataacttcaggacctatactcttaacaac

SEQ ID NO: 1068716 - DNA, 33 bp, Homo sapien
ctttataacttcaggatctatactcttaacaac

SEQ ID NO: 1068717 - DNA, 33 bp, Homo sapien
aagtgtgatctcctcacaggatcaaaccacagc

SEQ ID NO: 1068718 - DNA, 33 bp, Homo sapien
aagtgtgatctcctcataggatcaaaccacagc

SEQ ID NO: 1068719 - DNA, 33 bp, Homo sapien
tagataattagcaaccaaaatccaaaggagaaa

SEQ ID NO: 1068720 - DNA, 33 bp, Homo sapien
tagataattagcaaccgaaatccaaaggagaaa

SEQ ID NO: 1068721 - DNA, 33 bp, Homo sapien
gttgggccaagatgaaaaacacaaaacagctct

SEQ ID NO: 1068722 - DNA, 33 bp, Homo sapien
gttgggccaagatgaagaacacaaaacagctct

SEQ ID NO: 1068723 - DNA, 33 bp, Homo sapien
agatgtaaatctcaagccattttgctaatacag

SEQ ID NO: 1068724 - DNA, 33 bp, Homo sapien
agatgtaaatctcaagtcattttgctaatacag

SEQ ID NO: 1068725 - DNA, 33 bp, Homo sapien
tgtatgaaaaagcaaaatctgaactgctgaaca

SEQ ID NO: 1068726 - DNA, 33 bp, Homo sapien
tgtatgaaaaagcaaagtctgaactgctgaaca

SEQ ID NO: 1068727 - DNA, 33 bp, Homo sapien
ttagtgaatagcaacaagggtgaagaaattggc

SEQ ID NO: 1068728 - DNA, 33 bp, Homo sapien
ttagtgaatagcaacaggggtgaagaaattggc

SEQ ID NO: 1068729 - DNA, 33 bp, Homo sapien
catttaaccttttcaacaacgctttaggcacta

SEQ ID NO: 1068730 - DNA, 33 bp, Homo sapien
catttaaccttttcaagaacgctttaggcacta

SEQ ID NO: 1068731 - DNA, 33 bp, Homo sapien
atgaaaaagttctgaaaatagatttatggtgac

SEQ ID NO: 1068732 - DNA, 33 bp, Homo sapien
atgaaaaagttctgaagatagatttatggtgac

SEQ ID NO: 1068733 - DNA, 33 bp, Homo sapien
gtttcagaaaggtgaaatagagtaaaagatttg

SEQ ID NO: 1068734 - DNA, 33 bp, Homo sapien
gtttcagaaaggtgaagtagagtaaaagatttg

SEQ ID NO: 1068735 - DNA, 33 bp, Homo sapien
cttgtcctcttctcacaaaactcacagcaggtc

SEQ ID NO: 1068736 - DNA, 33 bp, Homo sapien
cttgtcctcttctcactaaactcacagcaggtc

SEQ ID NO: 1068737 - DNA, 33 bp, Homo sapien
attttagtcttataacactagaggttaactcac

SEQ ID NO: 1068738 - DNA, 33 bp, Homo sapien
attttagtcttataacgctagaggttaactcac

SEQ ID NO: 1068739 - DNA, 33 bp, Homo sapien
atgcttttcttagtaactgacagaccaagcaga

SEQ ID NO: 1068740 - DNA, 33 bp, Homo sapien
atgcttttcttagtaattgacagaccaagcaga

SEQ ID NO: 1068741 - DNA, 33 bp, Homo sapien
gtgctactcttgttcacggaccccctgactttt

SEQ ID NO: 1068742 - DNA, 33 bp, Homo sapien
gtgctactcttgttcatggaccccctgactttt

SEQ ID NO: 1068743 - DNA, 33 bp, Homo sapien
tattttccaaagtgatcaagaagtcattttagg

SEQ ID NO: 1068744 - DNA, 33 bp, Homo sapien
tattttccaaagtgattaagaagtcattttagg

SEQ ID NO: 1068745 - DNA, 33 bp, Homo sapien
ttggagctatctcttaaatatcacaatttacat

SEQ ID NO: 1068746 - DNA, 33 bp, Homo sapien
ttggagctatctcttatatatcacaatttacat

SEQ ID NO: 1068747 - DNA, 33 bp, Homo sapien
actggggtttgaaagaaaactccagcagcagca

SEQ ID NO: 1068748 - DNA, 33 bp, Homo sapien
actggggtttgaaagagaactccagcagcagca

SEQ ID NO: 1068749 - DNA, 33 bp, Homo sapien
gtacccagccagtcacagaatcttgtttgtctt

SEQ ID NO: 1068750 - DNA, 33 bp, Homo sapien
gtacccagccagtcacggaatcttgtttgtctt

SEQ ID NO: 1068751 - DNA, 33 bp, Homo sapien
ctgtatagaaatactaacggctattgtgtatta

SEQ ID NO: 1068752 - DNA, 33 bp, Homo sapien
ctgtatagaaatactagcggctattgtgtatta

SEQ ID NO: 1068753 - DNA, 33 bp, Homo sapien
aaaatagagtgaaacaatgccttctataaatga

SEQ ID NO: 1068754 - DNA, 33 bp, Homo sapien
aaaatagagtgaaacagtgccttctataaatga

SEQ ID NO: 1068755 - DNA, 33 bp, Homo sapien
ccttccctttttttccacagacattactcctct

SEQ ID NO: 1068756 - DNA, 33 bp, Homo sapien
ccttccctttttttccgcagacattactcctct

SEQ ID NO: 1068757 - DNA, 33 bp, Homo sapien
cagcatctatatcaggaattgcaaagtggtatc

SEQ ID NO: 1068758 - DNA, 33 bp, Homo sapien
cagcatctatatcaggcattgcaaagtggtatc

SEQ ID NO: 1068759 - DNA, 33 bp, Homo sapien
cacccctcatggaaacaggttcagaaaacaacc

SEQ ID NO: 1068760 - DNA, 33 bp, Homo sapien
cacccctcatggaaacgggttcagaaaacaacc

SEQ ID NO: 1068761 - DNA, 33 bp, Homo sapien
caatctctccatttaaactctcattagggagag

SEQ ID NO: 1068762 - DNA, 33 bp, Homo sapien
caatctctccatttaatctctcattagggagag

SEQ ID NO: 1068763 - DNA, 33 bp, Homo sapien
ggtatacatcagagccaatacgggtaccaccag

SEQ ID NO: 1068764 - DNA, 33 bp, Homo sapien
ggtatacatcagagcctatacgggtaccaccag

SEQ ID NO: 1068765 - DNA, 33 bp, Homo sapien
atacataccaagcatacgatggaaatgccaggc

SEQ ID NO: 1068766 - DNA, 33 bp, Homo sapien
atacataccaagcatatgatggaaatgccaggc

SEQ ID NO: 1068767 - DNA, 33 bp, Homo sapien
aagcagtaataacaacaattaaccatcatagat

SEQ ID NO: 1068768 - DNA, 33 bp, Homo sapien
aagcagtaataacaacgattaaccatcatagat

SEQ ID NO: 1068769 - DNA, 33 bp, Homo sapien
cactaaggacgctatccaaacaagtgcctgcct

SEQ ID NO: 1068770 - DNA, 33 bp, Homo sapien
cactaaggacgctatctaaacaagtgcctgcct

SEQ ID NO: 1068771 - DNA, 33 bp, Homo sapien
gaacttctgactaaccagctttaagttggggtt

SEQ ID NO: 1068772 - DNA, 33 bp, Homo sapien
gaacttctgactaaccggctttaagttggggtt

SEQ ID NO: 1068773 - DNA, 33 bp, Homo sapien
atatgaccttcttttcactcgattacatttgca

SEQ ID NO: 1068774 - DNA, 33 bp, Homo sapien
atatgaccttcttttctctcgattacatttgca

SEQ ID NO: 1068775 - DNA, 33 bp, Homo sapien
tcctccccaacacaaacccacaatgcacctctc

SEQ ID NO: 1068776 - DNA, 33 bp, Homo sapien
tcctccccaacacaaatccacaatgcacctctc

SEQ ID NO: 1068777 - DNA, 33 bp, Homo sapien
cactcgaacgatatcaatgaacaaaacaaggat

SEQ ID NO: 1068778 - DNA, 33 bp, Homo sapien
cactcgaacgatatcagtgaacaaaacaaggat

SEQ ID NO: 1068779 - DNA, 33 bp, Homo sapien
tagtttaatgactcacagaaatttgtaagactg

SEQ ID NO: 1068780 - DNA, 33 bp, Homo sapien
tagtttaatgactcactgaaatttgtaagactg

SEQ ID NO: 1068781 - DNA, 33 bp, Homo sapien
attctcacaacaaacccattgtagaggtgagta

SEQ ID NO: 1068782 - DNA, 33 bp, Homo sapien
attctcacaacaaacctattgtagaggtgagta

SEQ ID NO: 1068783 - DNA, 33 bp, Homo sapien
tttaagtatcctaaagcccaaaggattaatggt

SEQ ID NO: 1068784 - DNA, 33 bp, Homo sapien
tttaagtatcctaaagtccaaaggattaatggt

SEQ ID NO: 1068785 - DNA, 33 bp, Homo sapien
aagtcaggcagcattacgattccagtttgtgtt

SEQ ID NO: 1068786 - DNA, 33 bp, Homo sapien
aagtcaggcagcattatgattccagtttgtgtt

SEQ ID NO: 1068787 - DNA, 33 bp, Homo sapien
aaaaattagcctggtacggtagagcgtgcctgt

SEQ ID NO: 1068788 - DNA, 33 bp, Homo sapien
aaaaattagcctggtatggtagagcgtgcctgt

SEQ ID NO: 1068789 - DNA, 33 bp, Homo sapien
agtaaaaagcaaagaaccttaacatttttaata

SEQ ID NO: 1068790 - DNA, 33 bp, Homo sapien
agtaaaaagcaaagaatcttaacatttttaata

SEQ ID NO: 1068791 - DNA, 33 bp, Homo sapien
tccccccttgcatatcaaataggactgagcgaa

SEQ ID NO: 1068792 - DNA, 33 bp, Homo sapien
tccccccttgcatatcgaataggactgagcgaa

SEQ ID NO: 1068793 - DNA, 33 bp, Homo sapien
tggtcttagacaattagcatactagccttaact

SEQ ID NO: 1068794 - DNA, 33 bp, Homo sapien
tggtcttagacaattatcatactagccttaact

SEQ ID NO: 1068795 - DNA, 33 bp, Homo sapien
actctcattgttcacaagtgtactgattaagta

SEQ ID NO: 1068796 - DNA, 33 bp, Homo sapien
actctcattgttcacacgtgtactgattaagta

SEQ ID NO: 1068797 - DNA, 33 bp, Homo sapien
tggcttccaagtagtcaccggtccatatattcc

SEQ ID NO: 1068798 - DNA, 33 bp, Homo sapien
tggcttccaagtagtcgccggtccatatattcc

SEQ ID NO: 1068799 - DNA, 33 bp, Homo sapien
tacaatttacacaatactatgctggttcttaaa

SEQ ID NO: 1068800 - DNA, 33 bp, Homo sapien
tacaatttacacaatattatgctggttcttaaa

SEQ ID NO: 1068801 - DNA, 33 bp, Homo sapien
acttgataattcattagaaagaggctgcaatca

SEQ ID NO: 1068802 - DNA, 33 bp, Homo sapien
acttgataattcattataaagaggctgcaatca

SEQ ID NO: 1068803 - DNA, 33 bp, Homo sapien
tgggggaggaccctaaaatgcaatataaacaaa

SEQ ID NO: 1068804 - DNA, 33 bp, Homo sapien
tgggggaggaccctaagatgcaatataaacaaa

SEQ ID NO: 1068805 - DNA, 33 bp, Homo sapien
aagatataacttcgggacaaattccaatgttct

SEQ ID NO: 1068806 - DNA, 33 bp, Homo sapien
aagatataacttcggggcaaattccaatgttct

SEQ ID NO: 1068807 - DNA, 33 bp, Homo sapien
caggaatcagtccttgaattgaaagccactgcc

SEQ ID NO: 1068808 - DNA, 33 bp, Homo sapien
caggaatcagtccttggattgaaagccactgcc

SEQ ID NO: 1068809 - DNA, 33 bp, Homo sapien
cccacagtttggtagcccttcactagcaacaga

SEQ ID NO: 1068810 - DNA, 33 bp, Homo sapien
cccacagtttggtagctcttcactagcaacaga

SEQ ID NO: 1068811 - DNA, 33 bp, Homo sapien
cttaactcctgatccaatatagtgtctgatatc

SEQ ID NO: 1068812 - DNA, 33 bp, Homo sapien
cttaactcctgatccactatagtgtctgatatc

SEQ ID NO: 1068813 - DNA, 33 bp, Homo sapien
gagttttgatttgtaacataaagtgttgcaaaa

SEQ ID NO: 1068814 - DNA, 33 bp, Homo sapien
gagttttgatttgtaatataaagtgttgcaaaa

SEQ ID NO: 1068815 - DNA, 33 bp, Homo sapien
agctgcttgctactaaataggtcttgccaacat

SEQ ID NO: 1068816 - DNA, 33 bp, Homo sapien
agctgcttgctactaagtaggtcttgccaacat

SEQ ID NO: 1068817 - DNA, 33 bp, Homo sapien
ctagagaaataatccaaaaacaggtattggaga

SEQ ID NO: 1068818 - DNA, 33 bp, Homo sapien
ctagagaaataatccagaaacaggtattggaga

SEQ ID NO: 1068819 - DNA, 33 bp, Homo sapien
cttgtccaatgcccagaacatggcttagcaaaa

SEQ ID NO: 1068820 - DNA, 33 bp, Homo sapien
cttgtccaatgcccagcacatggcttagcaaaa

SEQ ID NO: 1068821 - DNA, 33 bp, Homo sapien
tgtagactgacagatgcattttctagcataaga

SEQ ID NO: 1068822 - DNA, 33 bp, Homo sapien
tgtagactgacagatgtattttctagcataaga

SEQ ID NO: 1068823 - DNA, 33 bp, Homo sapien
gcaagcttcactcactaaaacatcacaaatggg

SEQ ID NO: 1068824 - DNA, 33 bp, Homo sapien
gcaagcttcactcactgaaacatcacaaatggg

SEQ ID NO: 1068825 - DNA, 33 bp, Homo sapien
ctacaacaggcaagatcatcagcgagaacagcc

SEQ ID NO: 1068826 - DNA, 33 bp, Homo sapien
ctacaacaggcaagattatcagcgagaacagcc

SEQ ID NO: 1068827 - DNA, 33 bp, Homo sapien
caagaactactcaacaatattgtcaggtcactg

SEQ ID NO: 1068828 - DNA, 33 bp, Homo sapien
caagaactactcaacagtattgtcaggtcactg

SEQ ID NO: 1068829 - DNA, 33 bp, Homo sapien
atggaacttactggaacggtatgactagtggtg

SEQ ID NO: 1068830 - DNA, 33 bp, Homo sapien
atggaacttactggaatggtatgactagtggtg

SEQ ID NO: 1068831 - DNA, 33 bp, Homo sapien
aggagggtaggagagtaaaaattgacagagtga

SEQ ID NO: 1068832 - DNA, 33 bp, Homo sapien
aggagggtaggagagttaaaattgacagagtga

SEQ ID NO: 1068833 - DNA, 33 bp, Homo sapien
ctgccacagtgactaaacaacattcatgatttc

SEQ ID NO: 1068834 - DNA, 33 bp, Homo sapien
ctgccacagtgactaatcaacattcatgatttc

SEQ ID NO: 1068835 - DNA, 33 bp, Homo sapien
agcatcagtctcctcacagaaatgctaactgaa

SEQ ID NO: 1068836 - DNA, 33 bp, Homo sapien
agcatcagtctcctcatagaaatgctaactgaa

SEQ ID NO: 1068837 - DNA, 33 bp, Homo sapien
tcaatgatcagggaagacatagagcatcacaga

SEQ ID NO: 1068838 - DNA, 33 bp, Homo sapien
tcaatgatcagggaagccatagagcatcacaga

SEQ ID NO: 1068839 - DNA, 33 bp, Homo sapien
agaggcaggttcataaagggaatgagatgtgct

SEQ ID NO: 1068840 - DNA, 33 bp, Homo sapien
agaggcaggttcataaggggaatgagatgtgct

SEQ ID NO: 1068841 - DNA, 33 bp, Homo sapien
tagttaaaagcaagaacatcagacagaccttaa

SEQ ID NO: 1068842 - DNA, 33 bp, Homo sapien
tagttaaaagcaagaatatcagacagaccttaa

SEQ ID NO: 1068843 - DNA, 33 bp, Homo sapien
gaatacttgtagaaaccctgtcatttccttgct

SEQ ID NO: 1068844 - DNA, 33 bp, Homo sapien
gaatacttgtagaaacgctgtcatttccttgct

SEQ ID NO: 1068845 - DNA, 33 bp, Homo sapien
ttccccctcatctgtacaatttgaagattagaa

SEQ ID NO: 1068846 - DNA, 33 bp, Homo sapien
ttccccctcatctgtagaatttgaagattagaa

SEQ ID NO: 1068847 - DNA, 33 bp, Homo sapien
tgaagaaaagggactaactccaagctcattcta

SEQ ID NO: 1068848 - DNA, 33 bp, Homo sapien
tgaagaaaagggactatctccaagctcattcta

SEQ ID NO: 1068849 - DNA, 33 bp, Homo sapien
cggcgactccgcgacacgtcacagagaaaagct

SEQ ID NO: 1068850 - DNA, 33 bp, Homo sapien
cggcgactccgcgacatgtcacagagaaaagct

SEQ ID NO: 1068851 - DNA, 33 bp, Homo sapien
tcagtggacagttctacctccatgtccaagcag

SEQ ID NO: 1068852 - DNA, 33 bp, Homo sapien
tcagtggacagttctagctccatgtccaagcag

SEQ ID NO: 1068853 - DNA, 33 bp, Homo sapien
agaaaggttacttcaacgtgcatatgtttcaga

SEQ ID NO: 1068854 - DNA, 33 bp, Homo sapien
agaaaggttacttcaatgtgcatatgtttcaga

SEQ ID NO: 1068855 - DNA, 33 bp, Homo sapien
agtgatatagagaagaaggccttgaatttgttg

SEQ ID NO: 1068856 - DNA, 33 bp, Homo sapien
agtgatatagagaagagggccttgaatttgttg

SEQ ID NO: 1068857 - DNA, 33 bp, Homo sapien
taacgttcaagaggagacaggtagacagagtgc

SEQ ID NO: 1068858 - DNA, 33 bp, Homo sapien
taacgttcaagaggaggcaggtagacagagtgc

SEQ ID NO: 1068859 - DNA, 33 bp, Homo sapien
tctctgaatataccaccgtcaatatggggagga

SEQ ID NO: 1068860 - DNA, 33 bp, Homo sapien
tctctgaatataccactgtcaatatggggagga

SEQ ID NO: 1068861 - DNA, 33 bp, Homo sapien
agggtgagtgtactcaatacttaactgtctggt

SEQ ID NO: 1068862 - DNA, 33 bp, Homo sapien
agggtgagtgtactcattacttaactgtctggt

SEQ ID NO: 1068863 - DNA, 33 bp, Homo sapien
aactgctctggaaaaacgggtctgaactctagg

SEQ ID NO: 1068864 - DNA, 33 bp, Homo sapien
aactgctctggaaaaatgggtctgaactctagg

SEQ ID NO: 1068865 - DNA, 33 bp, Homo sapien
tttgtcctcttcacaacatcaccagttgccctc

SEQ ID NO: 1068866 - DNA, 33 bp, Homo sapien
tttgtcctcttcacaatatcaccagttgccctc

SEQ ID NO: 1068867 - DNA, 33 bp, Homo sapien
tctcatctttgccgtcaaaaactcatagtcttg

SEQ ID NO: 1068868 - DNA, 33 bp, Homo sapien
tctcatctttgccgtcgaaaactcatagtcttg

SEQ ID NO: 1068869 - DNA, 33 bp, Homo sapien
cttcagaaaagttaaaatatggaggcagtggga

SEQ ID NO: 1068870 - DNA, 33 bp, Homo sapien
cttcagaaaagttaaagtatggaggcagtggga

SEQ ID NO: 1068871 - DNA, 33 bp, Homo sapien
caagccctgaaggcaaatagtgagtatttaata

SEQ ID NO: 1068872 - DNA, 33 bp, Homo sapien
caagccctgaaggcaactagtgagtatttaata

SEQ ID NO: 1068873 - DNA, 33 bp, Homo sapien
accaatgttgtgggcaaaatttgttccaacggt

SEQ ID NO: 1068874 - DNA, 33 bp, Homo sapien
accaatgttgtgggcataatttgttccaacggt

SEQ ID NO: 1068875 - DNA, 33 bp, Homo sapien
gtgggcagaagtaatggatgcgacttctaggcc

SEQ ID NO: 1068876 - DNA, 33 bp, Homo sapien
gtgggcagaagtaatgtatgcgacttctaggcc

SEQ ID NO: 1068877 - DNA, 33 bp, Homo sapien
tatttgattctgtgtacggaaactttaaccatc

SEQ ID NO: 1068878 - DNA, 33 bp, Homo sapien
tatttgattctgtgtatggaaactttaaccatc

SEQ ID NO: 1068879 - DNA, 33 bp, Homo sapien
gtaatattttagaggccagataacatggtagat

SEQ ID NO: 1068880 - DNA, 33 bp, Homo sapien
gtaatattttagaggctagataacatggtagat

SEQ ID NO: 1068881 - DNA, 33 bp, Homo sapien
aggtgaatggttttcaaactagcagcaactcag

SEQ ID NO: 1068882 - DNA, 33 bp, Homo sapien
aggtgaatggttttcagactagcagcaactcag

SEQ ID NO: 1068883 - DNA, 33 bp, Homo sapien
gatcaaaacaacttcaataaaacacattgtaca

SEQ ID NO: 1068884 - DNA, 33 bp, Homo sapien
gatcaaaacaacttcagtaaaacacattgtaca

SEQ ID NO: 1068885 - DNA, 33 bp, Homo sapien
gcttttagcttgatgagccattctaaaagaggt

SEQ ID NO: 1068886 - DNA, 33 bp, Homo sapien
gcttttagcttgatgatccattctaaaagaggt

SEQ ID NO: 1068887 - DNA, 33 bp, Homo sapien
catatttggccacatcaagtaattccagatgtc

SEQ ID NO: 1068888 - DNA, 33 bp, Homo sapien
catatttggccacatcgagtaattccagatgtc

SEQ ID NO: 1068889 - DNA, 33 bp, Homo sapien
tgtggatctctaaacacgttaaattgtatgtgt

SEQ ID NO: 1068890 - DNA, 33 bp, Homo sapien
tgtggatctctaaacaggttaaattgtatgtgt

SEQ ID NO: 1068891 - DNA, 33 bp, Homo sapien
gatctagccagaacaaactacttatggttactt

SEQ ID NO: 1068892 - DNA, 33 bp, Homo sapien
gatctagccagaacaagctacttatggttactt

SEQ ID NO: 1068893 - DNA, 33 bp, Homo sapien
ctgctcctgcaaatcacgtgttgcaaaagtagc

SEQ ID NO: 1068894 - DNA, 33 bp, Homo sapien
ctgctcctgcaaatcatgtgttgcaaaagtagc

SEQ ID NO: 1068895 - DNA, 33 bp, Homo sapien
ggtttcgttaactgtaaacaagatacccaatcc

SEQ ID NO: 1068896 - DNA, 33 bp, Homo sapien
ggtttcgttaactgtagacaagatacccaatcc

SEQ ID NO: 1068897 - DNA, 33 bp, Homo sapien
gattttggagccaaagaaaactgaagaatagaa

SEQ ID NO: 1068898 - DNA, 33 bp, Homo sapien
gattttggagccaaagtaaactgaagaatagaa

SEQ ID NO: 1068899 - DNA, 33 bp, Homo sapien
tggctacttaatgtcaatctcctatcctagccc

SEQ ID NO: 1068900 - DNA, 33 bp, Homo sapien
tggctacttaatgtcagtctcctatcctagccc

SEQ ID NO: 1068901 - DNA, 33 bp, Homo sapien
actttacacagctagacgagagaacttgtcatg

SEQ ID NO: 1068902 - DNA, 33 bp, Homo sapien
actttacacagctagatgagagaacttgtcatg

SEQ ID NO: 1068903 - DNA, 33 bp, Homo sapien
tttggaaaaaaatgaactatacaggctgcctta

SEQ ID NO: 1068904 - DNA, 33 bp, Homo sapien
tttggaaaaaaatgaattatacaggctgcctta

SEQ ID NO: 1068905 - DNA, 33 bp, Homo sapien
tcctaattgggaagtaaggttgttgctgcttcc

SEQ ID NO: 1068906 - DNA, 33 bp, Homo sapien
tcctaattgggaagtacggttgttgctgcttcc

SEQ ID NO: 1068907 - DNA, 33 bp, Homo sapien
taccatttacctagtagaaatttggttcacgtc

SEQ ID NO: 1068908 - DNA, 33 bp, Homo sapien
taccatttacctagtataaatttggttcacgtc

SEQ ID NO: 1068909 - DNA, 33 bp, Homo sapien
ttctttgtttgtaatacagggatgagaatatca

SEQ ID NO: 1068910 - DNA, 33 bp, Homo sapien
ttctttgtttgtaatatagggatgagaatatca

SEQ ID NO: 1068911 - DNA, 33 bp, Homo sapien
ttcatctgcgggctaacgattgaaatctttact

SEQ ID NO: 1068912 - DNA, 33 bp, Homo sapien
ttcatctgcgggctaaggattgaaatctttact

SEQ ID NO: 1068913 - DNA, 33 bp, Homo sapien
ttcccagtaaaattcacgtctggtcctgtgttg

SEQ ID NO: 1068914 - DNA, 33 bp, Homo sapien
ttcccagtaaaattcaggtctggtcctgtgttg

SEQ ID NO: 1068915 - DNA, 33 bp, Homo sapien
ttgaaaggctgcaatcacagtaagatggtgagt

SEQ ID NO: 1068916 - DNA, 33 bp, Homo sapien
ttgaaaggctgcaatctcagtaagatggtgagt

SEQ ID NO: 1068917 - DNA, 33 bp, Homo sapien
aacaaacaaacaaaacccaacactgaagaaagc

SEQ ID NO: 1068918 - DNA, 33 bp, Homo sapien
aacaaacaaacaaaactcaacactgaagaaagc

SEQ ID NO: 1068919 - DNA, 33 bp, Homo sapien
cttatcccacagtaaaaccaaatctttatcata

SEQ ID NO: 1068920 - DNA, 33 bp, Homo sapien
cttatcccacagtaaagccaaatctttatcata

SEQ ID NO: 1068921 - DNA, 33 bp, Homo sapien
tgtgtcgctgttgttacgctgcttgtatgttgc

SEQ ID NO: 1068922 - DNA, 33 bp, Homo sapien
tgtgtcgctgttgttatgctgcttgtatgttgc

SEQ ID NO: 1068923 - DNA, 33 bp, Homo sapien
tcaaaggattgaaacacgctcttgcagtctgta

SEQ ID NO: 1068924 - DNA, 33 bp, Homo sapien
tcaaaggattgaaacatgctcttgcagtctgta

SEQ ID NO: 1068925 - DNA, 33 bp, Homo sapien
caaatattaacttttaaggctcatgatctgtca

SEQ ID NO: 1068926 - DNA, 33 bp, Homo sapien
caaatattaacttttacggctcatgatctgtca

SEQ ID NO: 1068927 - DNA, 33 bp, Homo sapien
caaaacactgctccgagaaatcatagataacac

SEQ ID NO: 1068928 - DNA, 33 bp, Homo sapien
caaaacactgctccgataaatcatagataacac

SEQ ID NO: 1068929 - DNA, 33 bp, Homo sapien
aaacaactactacataaggtgtaatgattttat

SEQ ID NO: 1068930 - DNA, 33 bp, Homo sapien
aaacaactactacatacggtgtaatgattttat

SEQ ID NO: 1068931 - DNA, 33 bp, Homo sapien
catgcatgacccagaaataggagaatagaagat

SEQ ID NO: 1068932 - DNA, 33 bp, Homo sapien
catgcatgacccagaagtaggagaatagaagat

SEQ ID NO: 1068933 - DNA, 33 bp, Homo sapien
gtcaacacatcttcctaaacatatggctgaaca

SEQ ID NO: 1068934 - DNA, 33 bp, Homo sapien
gtcaacacatcttcctgaacatatggctgaaca

SEQ ID NO: 1068935 - DNA, 33 bp, Homo sapien
agccatctgaaaggtaagtggaaagctactgtt

SEQ ID NO: 1068936 - DNA, 33 bp, Homo sapien
agccatctgaaaggtaggtggaaagctactgtt

SEQ ID NO: 1068937 - DNA, 33 bp, Homo sapien
atgaataaaatagaagcaatgcgctaacaaaga

SEQ ID NO: 1068938 - DNA, 33 bp, Homo sapien
atgaataaaatagaagtaatgcgctaacaaaga

SEQ ID NO: 1068939 - DNA, 33 bp, Homo sapien
ctggataggtccacaacgaaaggtggctgtaaa

SEQ ID NO: 1068940 - DNA, 33 bp, Homo sapien
ctggataggtccacaatgaaaggtggctgtaaa

SEQ ID NO: 1068941 - DNA, 33 bp, Homo sapien
gaaaactacactaagacgtcatttctaacctgt

SEQ ID NO: 1068942 - DNA, 33 bp, Homo sapien
gaaaactacactaagatgtcatttctaacctgt

SEQ ID NO: 1068943 - DNA, 33 bp, Homo sapien
tgcatgctgttctttacgttcagttccatgcat

SEQ ID NO: 1068944 - DNA, 33 bp, Homo sapien
tgcatgctgttctttatgttcagttccatgcat

SEQ ID NO: 1068945 - DNA, 33 bp, Homo sapien
gtcaactggctcataaaataaaccaggaaaaga

SEQ ID NO: 1068946 - DNA, 33 bp, Homo sapien
gtcaactggctcataagataaaccaggaaaaga

SEQ ID NO: 1068947 - DNA, 33 bp, Homo sapien
tctcatagtcaactgaagctacggggagagaaa

SEQ ID NO: 1068948 - DNA, 33 bp, Homo sapien
tctcatagtcaactgaggctacggggagagaaa

SEQ ID NO: 1068949 - DNA, 33 bp, Homo sapien
catgatccagtcaaaccctcttctattagcaaa

SEQ ID NO: 1068950 - DNA, 33 bp, Homo sapien
catgatccagtcaaactctcttctattagcaaa

SEQ ID NO: 1068951 - DNA, 33 bp, Homo sapien
cattctaatatcatataagcagattccactaat

SEQ ID NO: 1068952 - DNA, 33 bp, Homo sapien
cattctaatatcatatgagcagattccactaat

SEQ ID NO: 1068953 - DNA, 33 bp, Homo sapien
cttactatactttgcaacttacactatatagca

SEQ ID NO: 1068954 - DNA, 33 bp, Homo sapien
cttactatactttgcatcttacactatatagca

SEQ ID NO: 1068955 - DNA, 33 bp, Homo sapien
ttttcttgtggcatcccaagctaaggcccagtg

SEQ ID NO: 1068956 - DNA, 33 bp, Homo sapien
ttttcttgtggcatcctaagctaaggcccagtg

SEQ ID NO: 1068957 - DNA, 33 bp, Homo sapien
ccgcaaaaggcaccaacttaacagctatctatg

SEQ ID NO: 1068958 - DNA, 33 bp, Homo sapien
ccgcaaaaggcaccaagttaacagctatctatg

SEQ ID NO: 1068959 - DNA, 33 bp, Homo sapien
actgtagggaaataaccgaggaaagcaaaagac

SEQ ID NO: 1068960 - DNA, 33 bp, Homo sapien
actgtagggaaataactgaggaaagcaaaagac

SEQ ID NO: 1068961 - DNA, 33 bp, Homo sapien
aattcaattgaataaacagtagcagttactatt

SEQ ID NO: 1068962 - DNA, 33 bp, Homo sapien
aattcaattgaataaatagtagcagttactatt

SEQ ID NO: 1068963 - DNA, 33 bp, Homo sapien
tttctatcagctagaaaaggaatttgagagact

SEQ ID NO: 1068964 - DNA, 33 bp, Homo sapien
tttctatcagctagaagaggaatttgagagact

SEQ ID NO: 1068965 - DNA, 33 bp, Homo sapien
ttgacctatcttatcaatcgaacctccaagaag

SEQ ID NO: 1068966 - DNA, 33 bp, Homo sapien
ttgacctatcttatcagtcgaacctccaagaag

SEQ ID NO: 1068967 - DNA, 33 bp, Homo sapien
ctttgaaaggtatccacaatccaaccagatctc

SEQ ID NO: 1068968 - DNA, 33 bp, Homo sapien
ctttgaaaggtatccagaatccaaccagatctc

SEQ ID NO: 1068969 - DNA, 33 bp, Homo sapien
aatgatgagtataaagaccatgtttacattagt

SEQ ID NO: 1068970 - DNA, 33 bp, Homo sapien
aatgatgagtataaaggccatgtttacattagt

SEQ ID NO: 1068971 - DNA, 33 bp, Homo sapien
agttcagctatgctacagtagattggagtatgt

SEQ ID NO: 1068972 - DNA, 33 bp, Homo sapien
agttcagctatgctactgtagattggagtatgt

SEQ ID NO: 1068973 - DNA, 33 bp, Homo sapien
tccttttagccaactaaacatctgcaattagaa

SEQ ID NO: 1068974 - DNA, 33 bp, Homo sapien
tccttttagccaactagacatctgcaattagaa

SEQ ID NO: 1068975 - DNA, 33 bp, Homo sapien
atcagactcctgaaaccgtaacaaaattttgac

SEQ ID NO: 1068976 - DNA, 33 bp, Homo sapien
atcagactcctgaaactgtaacaaaattttgac

SEQ ID NO: 1068977 - DNA, 33 bp, Homo sapien
gtgcttacagtatgccacactgaatgtagttct

SEQ ID NO: 1068978 - DNA, 33 bp, Homo sapien
gtgcttacagtatgccgcactgaatgtagttct

SEQ ID NO: 1068979 - DNA, 33 bp, Homo sapien
tcaggattaatttatcaattgtccagcagaaat

SEQ ID NO: 1068980 - DNA, 33 bp, Homo sapien
tcaggattaatttatcgattgtccagcagaaat

SEQ ID NO: 1068981 - DNA, 33 bp, Homo sapien
ccttcattgaactggacagtgtgctctgtatct

SEQ ID NO: 1068982 - DNA, 33 bp, Homo sapien
ccttcattgaactggagagtgtgctctgtatct

SEQ ID NO: 1068983 - DNA, 33 bp, Homo sapien
agaatttttcaaggcacaatgctgctcctattt

SEQ ID NO: 1068984 - DNA, 33 bp, Homo sapien
agaatttttcaaggcataatgctgctcctattt

SEQ ID NO: 1068985 - DNA, 33 bp, Homo sapien
tttataacttttagaagcctcaacctcatggct

SEQ ID NO: 1068986 - DNA, 33 bp, Homo sapien
tttataacttttagaatcctcaacctcatggct

SEQ ID NO: 1068987 - DNA, 33 bp, Homo sapien
ttggaacttgtcaaaacgaaaatccacaggctc

SEQ ID NO: 1068988 - DNA, 33 bp, Homo sapien
ttggaacttgtcaaaatgaaaatccacaggctc

SEQ ID NO: 1068989 - DNA, 33 bp, Homo sapien
ggcaactcttgtgaaacccctctcccagcgtat

SEQ ID NO: 1068990 - DNA, 33 bp, Homo sapien
ggcaactcttgtgaaatccctctcccagcgtat

SEQ ID NO: 1068991 - DNA, 33 bp, Homo sapien
ggagctcatagtccaccgtctttttagtttgaa

SEQ ID NO: 1068992 - DNA, 33 bp, Homo sapien
ggagctcatagtccactgtctttttagtttgaa

SEQ ID NO: 1068993 - DNA, 33 bp, Homo sapien
caaactaacaacagtccaacagggatgtaggat

SEQ ID NO: 1068994 - DNA, 33 bp, Homo sapien
caaactaacaacagtcgaacagggatgtaggat

SEQ ID NO: 1068995 - DNA, 33 bp, Homo sapien
gatggatgcactagaaactcaacccccccatca

SEQ ID NO: 1068996 - DNA, 33 bp, Homo sapien
gatggatgcactagaagctcaacccccccatca

SEQ ID NO: 1068997 - DNA, 33 bp, Homo sapien
attgtccacacaggaactgtcattaggcaaggt

SEQ ID NO: 1068998 - DNA, 33 bp, Homo sapien
attgtccacacaggaagtgtcattaggcaaggt

SEQ ID NO: 1068999 - DNA, 33 bp, Homo sapien
ctggagttttaatgataagtgacagatagcttt

SEQ ID NO: 1069000 - DNA, 33 bp, Homo sapien
ctggagttttaatgatgagtgacagatagcttt

SEQ ID NO: 1069001 - DNA, 33 bp, Homo sapien
gaacaagtttaggtgaaaagaagttgttttctg

SEQ ID NO: 1069002 - DNA, 33 bp, Homo sapien
gaacaagtttaggtgagaagaagttgttttctg

SEQ ID NO: 1069003 - DNA, 33 bp, Homo sapien
agttctcttgggctcacggtgtgatttttctcc

SEQ ID NO: 1069004 - DNA, 33 bp, Homo sapien
agttctcttgggctcatggtgtgatttttctcc

SEQ ID NO: 1069005 - DNA, 33 bp, Homo sapien
agtaaaaatgcctatgcaactctgtagttacag

SEQ ID NO: 1069006 - DNA, 33 bp, Homo sapien
agtaaaaatgcctatggaactctgtagttacag

SEQ ID NO: 1069007 - DNA, 33 bp, Homo sapien
acccctcaggcagatgcatgaaagtgtagctgc

SEQ ID NO: 1069008 - DNA, 33 bp, Homo sapien
acccctcaggcagatgtatgaaagtgtagctgc

SEQ ID NO: 1069009 - DNA, 33 bp, Homo sapien
tttggtatatgtagacgagagaactgcatccag

SEQ ID NO: 1069010 - DNA, 33 bp, Homo sapien
tttggtatatgtagactagagaactgcatccag

SEQ ID NO: 1069011 - DNA, 33 bp, Homo sapien
ctaagttcaaaaaccaatcctagtatctttgtt

SEQ ID NO: 1069012 - DNA, 33 bp, Homo sapien
ctaagttcaaaaaccagtcctagtatctttgtt

SEQ ID NO: 1069013 - DNA, 33 bp, Homo sapien
gggcaaaactaatgtacgctgttagaagacaga

SEQ ID NO: 1069014 - DNA, 33 bp, Homo sapien
gggcaaaactaatgtatgctgttagaagacaga

SEQ ID NO: 1069015 - DNA, 33 bp, Homo sapien
ttttaggatttctccacgagttattgaaggata

SEQ ID NO: 1069016 - DNA, 33 bp, Homo sapien
ttttaggatttctccatgagttattgaaggata

SEQ ID NO: 1069017 - DNA, 33 bp, Homo sapien
ctcacaacagaggccacgtgaaaggaatgcagg

SEQ ID NO: 1069018 - DNA, 33 bp, Homo sapien
ctcacaacagaggccatgtgaaaggaatgcagg

SEQ ID NO: 1069019 - DNA, 33 bp, Homo sapien
aagtcagctaatttcaaaacaactagttacttg

SEQ ID NO: 1069020 - DNA, 33 bp, Homo sapien
aagtcagctaatttcagaacaactagttacttg

SEQ ID NO: 1069021 - DNA, 33 bp, Homo sapien
aagtgattgataaatacagctaactgcaatacc

SEQ ID NO: 1069022 - DNA, 33 bp, Homo sapien
aagtgattgataaatatagctaactgcaatacc

SEQ ID NO: 1069023 - DNA, 33 bp, Homo sapien
accttgcttcagtggaaaactcaggtggtgaaa

SEQ ID NO: 1069024 - DNA, 33 bp, Homo sapien
accttgcttcagtggagaactcaggtggtgaaa

SEQ ID NO: 1069025 - DNA, 33 bp, Homo sapien
ctagtaaaatctcttaaaatgatggaaaacaga

SEQ ID NO: 1069026 - DNA, 33 bp, Homo sapien
ctagtaaaatctcttacaatgatggaaaacaga

SEQ ID NO: 1069027 - DNA, 33 bp, Homo sapien
aggataatgattaagcaaagatttcctttttta

SEQ ID NO: 1069028 - DNA, 33 bp, Homo sapien
aggataatgattaagcgaagatttcctttttta

SEQ ID NO: 1069029 - DNA, 33 bp, Homo sapien
agagggaaggaggactaaattctctctgaaatt

SEQ ID NO: 1069030 - DNA, 33 bp, Homo sapien
agagggaaggaggactgaattctctctgaaatt

SEQ ID NO: 1069031 - DNA, 33 bp, Homo sapien
atattttcatttttcactaggccttgcaaatta

SEQ ID NO: 1069032 - DNA, 33 bp, Homo sapien
atattttcatttttcagtaggccttgcaaatta

SEQ ID NO: 1069033 - DNA, 33 bp, Homo sapien
atataattatcagggcacataggtcaacatgga

SEQ ID NO: 1069034 - DNA, 33 bp, Homo sapien
atataattatcagggcgcataggtcaacatgga

SEQ ID NO: 1069035 - DNA, 33 bp, Homo sapien
caggttttttggagacaataaagtggctatttg

SEQ ID NO: 1069036 - DNA, 33 bp, Homo sapien
caggttttttggagacgataaagtggctatttg

SEQ ID NO: 1069037 - DNA, 33 bp, Homo sapien
agtgaagaaaagttcaatctcattcactattgg

SEQ ID NO: 1069038 - DNA, 33 bp, Homo sapien
agtgaagaaaagttcagtctcattcactattgg

SEQ ID NO: 1069039 - DNA, 33 bp, Homo sapien
gagaagcaatattttcccttactgctcacccat

SEQ ID NO: 1069040 - DNA, 33 bp, Homo sapien
gagaagcaatattttctcttactgctcacccat

SEQ ID NO: 1069041 - DNA, 33 bp, Homo sapien
aacaatgtataaactacgctatgttctgcataa

SEQ ID NO: 1069042 - DNA, 33 bp, Homo sapien
aacaatgtataaactatgctatgttctgcataa

SEQ ID NO: 1069043 - DNA, 33 bp, Homo sapien
cttcctctttactctacatcagctttttgtacc

SEQ ID NO: 1069044 - DNA, 33 bp, Homo sapien
cttcctctttactctatatcagctttttgtacc

SEQ ID NO: 1069045 - DNA, 33 bp, Homo sapien
tgtcatggttccagtacagaacatccatctctc

SEQ ID NO: 1069046 - DNA, 33 bp, Homo sapien
tgtcatggttccagtatagaacatccatctctc

SEQ ID NO: 1069047 - DNA, 33 bp, Homo sapien
ctagcttcttccttgactacattctaacaccca

SEQ ID NO: 1069048 - DNA, 33 bp, Homo sapien
ctagcttcttccttgattacattctaacaccca

SEQ ID NO: 1069049 - DNA, 33 bp, Homo sapien
tcatgtgctacccaacaaaatatctgtaagaca

SEQ ID NO: 1069050 - DNA, 33 bp, Homo sapien
tcatgtgctacccaacgaaatatctgtaagaca

SEQ ID NO: 1069051 - DNA, 33 bp, Homo sapien
aaacataagctacataactcctggtggaaatga

SEQ ID NO: 1069052 - DNA, 33 bp, Homo sapien
aaacataagctacatagctcctggtggaaatga

SEQ ID NO: 1069053 - DNA, 33 bp, Homo sapien
attctcatgcaaatctaactagacttttgatct

SEQ ID NO: 1069054 - DNA, 33 bp, Homo sapien
attctcatgcaaatctgactagacttttgatct

SEQ ID NO: 1069055 - DNA, 33 bp, Homo sapien
aggctgacagagaaccaaaacacactactcagg

SEQ ID NO: 1069056 - DNA, 33 bp, Homo sapien
aggctgacagagaaccgaaacacactactcagg

SEQ ID NO: 1069057 - DNA, 33 bp, Homo sapien
ggtttaaattgatgtcaaggcattgaggggtca

SEQ ID NO: 1069058 - DNA, 33 bp, Homo sapien
ggtttaaattgatgtctaggcattgaggggtca

SEQ ID NO: 1069059 - DNA, 33 bp, Homo sapien
tcatcaatgcctgggcaatgaactgccatgaat

SEQ ID NO: 1069060 - DNA, 33 bp, Homo sapien
tcatcaatgcctgggcgatgaactgccatgaat

SEQ ID NO: 1069061 - DNA, 33 bp, Homo sapien
aagatatcacggtgaacattcatggcagttcat

SEQ ID NO: 1069062 - DNA, 33 bp, Homo sapien
aagatatcacggtgaatattcatggcagttcat

SEQ ID NO: 1069063 - DNA, 33 bp, Homo sapien
tccattgtaaggatgcacaatgacaaacaatgt

SEQ ID NO: 1069064 - DNA, 33 bp, Homo sapien
tccattgtaaggatgcgcaatgacaaacaatgt

SEQ ID NO: 1069065 - DNA, 33 bp, Homo sapien
gcacagagatacaacacaactaataatcaatga

SEQ ID NO: 1069066 - DNA, 33 bp, Homo sapien
gcacagagatacaacataactaataatcaatga

SEQ ID NO: 1069067 - DNA, 33 bp, Homo sapien
tgtgcacgctcacccaaaagtgaaggtagtgag

SEQ ID NO: 1069068 - DNA, 33 bp, Homo sapien
tgtgcacgctcacccagaagtgaaggtagtgag

SEQ ID NO: 1069069 - DNA, 33 bp, Homo sapien
aggaagtagccagaaacagtcatagctcgaaca

SEQ ID NO: 1069070 - DNA, 33 bp, Homo sapien
aggaagtagccagaaagagtcatagctcgaaca

SEQ ID NO: 1069071 - DNA, 33 bp, Homo sapien
actccaaatggtactaaagacagaaccacacat

SEQ ID NO: 1069072 - DNA, 33 bp, Homo sapien
actccaaatggtactacagacagaaccacacat

SEQ ID NO: 1069073 - DNA, 33 bp, Homo sapien
gctcagaactgtaatacactaagctgtggagga

SEQ ID NO: 1069074 - DNA, 33 bp, Homo sapien
gctcagaactgtaatatactaagctgtggagga

SEQ ID NO: 1069075 - DNA, 33 bp, Homo sapien
ggctattgaaacacaaatgatctcagaattaag

SEQ ID NO: 1069076 - DNA, 33 bp, Homo sapien
ggctattgaaacacaagtgatctcagaattaag

SEQ ID NO: 1069077 - DNA, 33 bp, Homo sapien
taactcaaagcttctcaacctcagagttactgg

SEQ ID NO: 1069078 - DNA, 33 bp, Homo sapien
taactcaaagcttctcgacctcagagttactgg

SEQ ID NO: 1069079 - DNA, 33 bp, Homo sapien
attttgtctcccaggaagtatttgacagtctgg

SEQ ID NO: 1069080 - DNA, 33 bp, Homo sapien
attttgtctcccaggaggtatttgacagtctgg

SEQ ID NO: 1069081 - DNA, 33 bp, Homo sapien
tttacagcagccatccaatctgatccttgtata

SEQ ID NO: 1069082 - DNA, 33 bp, Homo sapien
tttacagcagccatccgatctgatccttgtata

SEQ ID NO: 1069083 - DNA, 33 bp, Homo sapien
ttgtcactgaataaaaccttcagagttatcctt

SEQ ID NO: 1069084 - DNA, 33 bp, Homo sapien
ttgtcactgaataaaagcttcagagttatcctt

SEQ ID NO: 1069085 - DNA, 33 bp, Homo sapien
ttgtttgcaactgaaaacaaatgtttcctgtgt

SEQ ID NO: 1069086 - DNA, 33 bp, Homo sapien
ttgtttgcaactgaaagcaaatgtttcctgtgt

SEQ ID NO: 1069087 - DNA, 33 bp, Homo sapien
ttatttagtattcttgcattgttagtgaatcta

SEQ ID NO: 1069088 - DNA, 33 bp, Homo sapien
ttatttagtattcttgtattgttagtgaatcta

SEQ ID NO: 1069089 - DNA, 33 bp, Homo sapien
tgtcagtggactgcaaagcaagggtgagtgaaa

SEQ ID NO: 1069090 - DNA, 33 bp, Homo sapien
tgtcagtggactgcaaggcaagggtgagtgaaa

SEQ ID NO: 1069091 - DNA, 33 bp, Homo sapien
catcagaaatctaggaaagtgctaggtaatggg

SEQ ID NO: 1069092 - DNA, 33 bp, Homo sapien
catcagaaatctaggagagtgctaggtaatggg

SEQ ID NO: 1069093 - DNA, 33 bp, Homo sapien
atcttttggtaacagacaagtcacggtgtggaa

SEQ ID NO: 1069094 - DNA, 33 bp, Homo sapien
atcttttggtaacagagaagtcacggtgtggaa

SEQ ID NO: 1069095 - DNA, 33 bp, Homo sapien
tgagttccaatgcaaacttccacaatgactgca

SEQ ID NO: 1069096 - DNA, 33 bp, Homo sapien
tgagttccaatgcaaagttccacaatgactgca

SEQ ID NO: 1069097 - DNA, 33 bp, Homo sapien
taccatgatctattctaaagaactgcaacatta

SEQ ID NO: 1069098 - DNA, 33 bp, Homo sapien
taccatgatctattctgaagaactgcaacatta

SEQ ID NO: 1069099 - DNA, 33 bp, Homo sapien
tagattaagcaaattaacatatctgtcacatca

SEQ ID NO: 1069100 - DNA, 33 bp, Homo sapien
tagattaagcaaattatcatatctgtcacatca

SEQ ID NO: 1069101 - DNA, 33 bp, Homo sapien
ctgggcagggactcccaacctgagattccagag

SEQ ID NO: 1069102 - DNA, 33 bp, Homo sapien
ctgggcagggactcccgacctgagattccagag

SEQ ID NO: 1069103 - DNA, 33 bp, Homo sapien
tgtattcttggaagtacgcaacttgtttgattt

SEQ ID NO: 1069104 - DNA, 33 bp, Homo sapien
tgtattcttggaagtaggcaacttgtttgattt

SEQ ID NO: 1069105 - DNA, 33 bp, Homo sapien
tggtgatggacttatacgctgaagggaatttta

SEQ ID NO: 1069106 - DNA, 33 bp, Homo sapien
tggtgatggacttatatgctgaagggaatttta

SEQ ID NO: 1069107 - DNA, 33 bp, Homo sapien
gccttatctgcaatcccatgtgtcaggaggcac

SEQ ID NO: 1069108 - DNA, 33 bp, Homo sapien
gccttatctgcaatcctatgtgtcaggaggcac

SEQ ID NO: 1069109 - DNA, 33 bp, Homo sapien
agaattatgtccaaggaaggatggtaaaaagat

SEQ ID NO: 1069110 - DNA, 33 bp, Homo sapien
agaattatgtccaagggaggatggtaaaaagat

SEQ ID NO: 1069111 - DNA, 33 bp, Homo sapien
gttttgaagctactccacaactctgtgacgata

SEQ ID NO: 1069112 - DNA, 33 bp, Homo sapien
gttttgaagctactccgcaactctgtgacgata

SEQ ID NO: 1069113 - DNA, 33 bp, Homo sapien
ttgttcctcacccctcagagatgttgtgcccaa

SEQ ID NO: 1069114 - DNA, 33 bp, Homo sapien
ttgttcctcacccctcggagatgttgtgcccaa

SEQ ID NO: 1069115 - DNA, 33 bp, Homo sapien
ttggtgggagggctctaaacaagcattcataag

SEQ ID NO: 1069116 - DNA, 33 bp, Homo sapien
ttggtgggagggctctgaacaagcattcataag

SEQ ID NO: 1069117 - DNA, 33 bp, Homo sapien
ccaggacagcctcaaacggctaacatgaccacc

SEQ ID NO: 1069118 - DNA, 33 bp, Homo sapien
ccaggacagcctcaaatggctaacatgaccacc

SEQ ID NO: 1069119 - DNA, 33 bp, Homo sapien
gataaaactagtcaaacggtaatggtagcattt

SEQ ID NO: 1069120 - DNA, 33 bp, Homo sapien
gataaaactagtcaaatggtaatggtagcattt

SEQ ID NO: 1069121 - DNA, 33 bp, Homo sapien
gttcatgtaaaataccactttctaggaagttta

SEQ ID NO: 1069122 - DNA, 33 bp, Homo sapien
gttcatgtaaaatacctctttctaggaagttta

SEQ ID NO: 1069123 - DNA, 33 bp, Homo sapien
gttccccatagtacatcactgatcttatttctt

SEQ ID NO: 1069124 - DNA, 33 bp, Homo sapien
gttccccatagtacattactgatcttatttctt

SEQ ID NO: 1069125 - DNA, 33 bp, Homo sapien
tgaatatcagaatatacctggaaatgtccaata

SEQ ID NO: 1069126 - DNA, 33 bp, Homo sapien
tgaatatcagaatatagctggaaatgtccaata

SEQ ID NO: 1069127 - DNA, 33 bp, Homo sapien
ggactgaaaggacttacgattacacctatatgt

SEQ ID NO: 1069128 - DNA, 33 bp, Homo sapien
ggactgaaaggacttatgattacacctatatgt

SEQ ID NO: 1069129 - DNA, 33 bp, Homo sapien
agcaggaagcatctaacataaattagactaaat

SEQ ID NO: 1069130 - DNA, 33 bp, Homo sapien
agcaggaagcatctaagataaattagactaaat

SEQ ID NO: 1069131 - DNA, 33 bp, Homo sapien
agactacagatactgcccaataaagaacatttt

SEQ ID NO: 1069132 - DNA, 33 bp, Homo sapien
agactacagatactgctcaataaagaacatttt

SEQ ID NO: 1069133 - DNA, 33 bp, Homo sapien
aagtatgaacagtagtcaagttgtagacacatt

SEQ ID NO: 1069134 - DNA, 33 bp, Homo sapien
aagtatgaacagtagttaagttgtagacacatt

SEQ ID NO: 1069135 - DNA, 33 bp, Homo sapien
tatcggcatactttacactgtcttctttttgga

SEQ ID NO: 1069136 - DNA, 33 bp, Homo sapien
tatcggcatactttacgctgtcttctttttgga

SEQ ID NO: 1069137 - DNA, 33 bp, Homo sapien
ctttagttttcaaaaggctttaggtgatctagt

SEQ ID NO: 1069138 - DNA, 33 bp, Homo sapien
ctttagttttcaaaagtctttaggtgatctagt

SEQ ID NO: 1069139 - DNA, 33 bp, Homo sapien
atcttactaatgtgcaatgcaattattggaata

SEQ ID NO: 1069140 - DNA, 33 bp, Homo sapien
atcttactaatgtgcagtgcaattattggaata

SEQ ID NO: 1069141 - DNA, 33 bp, Homo sapien
atttattagtacacaaagtatggttaactaata

SEQ ID NO: 1069142 - DNA, 33 bp, Homo sapien
atttattagtacacaatgtatggttaactaata

SEQ ID NO: 1069143 - DNA, 33 bp, Homo sapien
gctcacaggtaaaaacaaattgtggctaaagca

SEQ ID NO: 1069144 - DNA, 33 bp, Homo sapien
gctcacaggtaaaaaccaattgtggctaaagca

SEQ ID NO: 1069145 - DNA, 33 bp, Homo sapien
aggatgtaagagccaacttgaagagaccctcat

SEQ ID NO: 1069146 - DNA, 33 bp, Homo sapien
aggatgtaagagccaatttgaagagaccctcat

SEQ ID NO: 1069147 - DNA, 33 bp, Homo sapien
gacccataaccaagtcaaaaaaatactctatac

SEQ ID NO: 1069148 - DNA, 33 bp, Homo sapien
gacccataaccaagtcgaaaaaatactctatac

SEQ ID NO: 1069149 - DNA, 33 bp, Homo sapien
cactttttatgtaggcacttataggtttaaact

SEQ ID NO: 1069150 - DNA, 33 bp, Homo sapien
cactttttatgtaggcgcttataggtttaaact

SEQ ID NO: 1069151 - DNA, 33 bp, Homo sapien
atctgaggtatgaacagattttttcacgacaaa

SEQ ID NO: 1069152 - DNA, 33 bp, Homo sapien
atctgaggtatgaacatattttttcacgacaaa

SEQ ID NO: 1069153 - DNA, 33 bp, Homo sapien
tgttaatcaataacaacgctgtttggaaaatta

SEQ ID NO: 1069154 - DNA, 33 bp, Homo sapien
tgttaatcaataacaatgctgtttggaaaatta

SEQ ID NO: 1069155 - DNA, 33 bp, Homo sapien
aagttgcaattatttgaaggacaagaggaactc

SEQ ID NO: 1069156 - DNA, 33 bp, Homo sapien
aagttgcaattatttggaggacaagaggaactc

SEQ ID NO: 1069157 - DNA, 33 bp, Homo sapien
tctttttctggttattaaactagcttctaaagt

SEQ ID NO: 1069158 - DNA, 33 bp, Homo sapien
tctttttctggttattgaactagcttctaaagt

SEQ ID NO: 1069159 - DNA, 33 bp, Homo sapien
tgttccaatatgaaacagttccaatatgagaca

SEQ ID NO: 1069160 - DNA, 33 bp, Homo sapien
tgttccaatatgaaacggttccaatatgagaca

SEQ ID NO: 1069161 - DNA, 33 bp, Homo sapien
cctatcaaactacaaaagacactcttcacagaa

SEQ ID NO: 1069162 - DNA, 33 bp, Homo sapien
cctatcaaactacaaatgacactcttcacagaa

SEQ ID NO: 1069163 - DNA, 33 bp, Homo sapien
tatatatgtaaatttgcatcacagggatttggt

SEQ ID NO: 1069164 - DNA, 33 bp, Homo sapien
tatatatgtaaatttgtatcacagggatttggt

SEQ ID NO: 1069165 - DNA, 33 bp, Homo sapien
aatttttattgtacatcacggaacaagttgggt

SEQ ID NO: 1069166 - DNA, 33 bp, Homo sapien
aatttttattgtacatgacggaacaagttgggt

SEQ ID NO: 1069167 - DNA, 33 bp, Homo sapien
tgtagtatctttaagaactctagctgtggtaga

SEQ ID NO: 1069168 - DNA, 33 bp, Homo sapien
tgtagtatctttaagagctctagctgtggtaga

SEQ ID NO: 1069169 - DNA, 33 bp, Homo sapien
ctggcattaaattttcaccatttgttcttgttc

SEQ ID NO: 1069170 - DNA, 33 bp, Homo sapien
ctggcattaaattttcgccatttgttcttgttc

SEQ ID NO: 1069171 - DNA, 33 bp, Homo sapien
agtatgtaataaggtaaccatatatgtgtgtgt

SEQ ID NO: 1069172 - DNA, 33 bp, Homo sapien
agtatgtaataaggtacccatatatgtgtgtgt

SEQ ID NO: 1069173 - DNA, 33 bp, Homo sapien
tacacgtttctagagcaatattacattttcatc

SEQ ID NO: 1069174 - DNA, 33 bp, Homo sapien
tacacgtttctagagcgatattacattttcatc

SEQ ID NO: 1069175 - DNA, 33 bp, Homo sapien
gtaatataaaggtacaccaatgcatgaggcttt

SEQ ID NO: 1069176 - DNA, 33 bp, Homo sapien
gtaatataaaggtacagcaatgcatgaggcttt

SEQ ID NO: 1069177 - DNA, 33 bp, Homo sapien
ttaatagcttgctccaataaaatgatctttact

SEQ ID NO: 1069178 - DNA, 33 bp, Homo sapien
ttaatagcttgctccagtaaaatgatctttact

SEQ ID NO: 1069179 - DNA, 33 bp, Homo sapien
atctactattaagcaacgtattccaaacagcat

SEQ ID NO: 1069180 - DNA, 33 bp, Homo sapien
atctactattaagcaatgtattccaaacagcat

SEQ ID NO: 1069181 - DNA, 33 bp, Homo sapien
actatattaactatccaagtgacaggatcaata

SEQ ID NO: 1069182 - DNA, 33 bp, Homo sapien
actatattaactatccgagtgacaggatcaata

SEQ ID NO: 1069183 - DNA, 33 bp, Homo sapien
caatggagaggtgtgaaaagctccattccccag

SEQ ID NO: 1069184 - DNA, 33 bp, Homo sapien
caatggagaggtgtgagaagctccattccccag

SEQ ID NO: 1069185 - DNA, 33 bp, Homo sapien
cataagtttccttctcacctgtcttgaggcaag

SEQ ID NO: 1069186 - DNA, 33 bp, Homo sapien
cataagtttccttctcccctgtcttgaggcaag

SEQ ID NO: 1069187 - DNA, 33 bp, Homo sapien
atcttcatccttaaaaataagtgttagactaga

SEQ ID NO: 1069188 - DNA, 33 bp, Homo sapien
atcttcatccttaaaactaagtgttagactaga

SEQ ID NO: 1069189 - DNA, 33 bp, Homo sapien
atgaggaaattgtgtagatctataaaacccttt

SEQ ID NO: 1069190 - DNA, 33 bp, Homo sapien
atgaggaaattgtgtatatctataaaacccttt

SEQ ID NO: 1069191 - DNA, 33 bp, Homo sapien
atggccaagagcaggactaataaatgaggaaat

SEQ ID NO: 1069192 - DNA, 33 bp, Homo sapien
atggccaagagcaggattaataaatgaggaaat

SEQ ID NO: 1069193 - DNA, 33 bp, Homo sapien
ccataatcagatcagaaattatgacaacattct

SEQ ID NO: 1069194 - DNA, 33 bp, Homo sapien
ccataatcagatcagacattatgacaacattct

SEQ ID NO: 1069195 - DNA, 33 bp, Homo sapien
gaactacaagatccacggacattttaaactgac

SEQ ID NO: 1069196 - DNA, 33 bp, Homo sapien
gaactacaagatccactgacattttaaactgac

SEQ ID NO: 1069197 - DNA, 33 bp, Homo sapien
ccagctgtacaaactgaagtcctagcaactatc

SEQ ID NO: 1069198 - DNA, 33 bp, Homo sapien
ccagctgtacaaactggagtcctagcaactatc

SEQ ID NO: 1069199 - DNA, 33 bp, Homo sapien
atgatgttttgttgccaagtaacattatttttc

SEQ ID NO: 1069200 - DNA, 33 bp, Homo sapien
atgatgttttgttgccgagtaacattatttttc

SEQ ID NO: 1069201 - DNA, 33 bp, Homo sapien
aacattcagaaataaagctgcacaactacaacc

SEQ ID NO: 1069202 - DNA, 33 bp, Homo sapien
aacattcagaaataaatctgcacaactacaacc

SEQ ID NO: 1069203 - DNA, 33 bp, Homo sapien
ggttatttactggtaaacatttaagcagagaaa

SEQ ID NO: 1069204 - DNA, 33 bp, Homo sapien
ggttatttactggtaaccatttaagcagagaaa

SEQ ID NO: 1069205 - DNA, 33 bp, Homo sapien
tttctcacagggctcaataattggttgagtata

SEQ ID NO: 1069206 - DNA, 33 bp, Homo sapien
tttctcacagggctcagtaattggttgagtata

SEQ ID NO: 1069207 - DNA, 33 bp, Homo sapien
tatttctgttagaagacgttcagttttttacca

SEQ ID NO: 1069208 - DNA, 33 bp, Homo sapien
tatttctgttagaagatgttcagttttttacca

SEQ ID NO: 1069209 - DNA, 33 bp, Homo sapien
aaaagataacaacgaaaactataagagaacact

SEQ ID NO: 1069210 - DNA, 33 bp, Homo sapien
aaaagataacaacgaagactataagagaacact

SEQ ID NO: 1069211 - DNA, 33 bp, Homo sapien
atgcagagatgtgctacgtaaatccacaacttt

SEQ ID NO: 1069212 - DNA, 33 bp, Homo sapien
atgcagagatgtgctatgtaaatccacaacttt

SEQ ID NO: 1069213 - DNA, 33 bp, Homo sapien
taccatctatcagctacgccatctttgaagtta

SEQ ID NO: 1069214 - DNA, 33 bp, Homo sapien
taccatctatcagctatgccatctttgaagtta

SEQ ID NO: 1069215 - DNA, 33 bp, Homo sapien
ctctttcttacgttaaacacctaatcttgtgcc

SEQ ID NO: 1069216 - DNA, 33 bp, Homo sapien
ctctttcttacgttaatcacctaatcttgtgcc

SEQ ID NO: 1069217 - DNA, 33 bp, Homo sapien
tcttggaatcggagaactataagggatttatag

SEQ ID NO: 1069218 - DNA, 33 bp, Homo sapien
tcttggaatcggagaagtataagggatttatag

SEQ ID NO: 1069219 - DNA, 33 bp, Homo sapien
tagagagataatcgaaatagaaaactagcaaag

SEQ ID NO: 1069220 - DNA, 33 bp, Homo sapien
tagagagataatcgaagtagaaaactagcaaag

SEQ ID NO: 1069221 - DNA, 33 bp, Homo sapien
ctcagaggcactggaaaatatttcatgtcagta

SEQ ID NO: 1069222 - DNA, 33 bp, Homo sapien
ctcagaggcactggaagatatttcatgtcagta

SEQ ID NO: 1069223 - DNA, 33 bp, Homo sapien
gttgtatccaatatgaacacaattgaagagtgg

SEQ ID NO: 1069224 - DNA, 33 bp, Homo sapien
gttgtatccaatatgaccacaattgaagagtgg

SEQ ID NO: 1069225 - DNA, 33 bp, Homo sapien
ccctcatctaacgatacgctgttattcaagttt

SEQ ID NO: 1069226 - DNA, 33 bp, Homo sapien
ccctcatctaacgatatgctgttattcaagttt

SEQ ID NO: 1069227 - DNA, 33 bp, Homo sapien
gtctatgccagggcaactctagataacacaaag

SEQ ID NO: 1069228 - DNA, 33 bp, Homo sapien
gtctatgccagggcaagtctagataacacaaag

SEQ ID NO: 1069229 - DNA, 33 bp, Homo sapien
atctgcttccttacctaagaaaacatcattgga

SEQ ID NO: 1069230 - DNA, 33 bp, Homo sapien
atctgcttccttacctgagaaaacatcattgga

SEQ ID NO: 1069231 - DNA, 33 bp, Homo sapien
taatatgaacatagaaccaaaaggatttgctgt

SEQ ID NO: 1069232 - DNA, 33 bp, Homo sapien
taatatgaacatagaatcaaaaggatttgctgt

SEQ ID NO: 1069233 - DNA, 33 bp, Homo sapien
catcacttctatctccaaactgtatccaaaatt

SEQ ID NO: 1069234 - DNA, 33 bp, Homo sapien
catcacttctatctccgaactgtatccaaaatt

SEQ ID NO: 1069235 - DNA, 33 bp, Homo sapien
aaattactgcatatcacgacttacgatgaaatt

SEQ ID NO: 1069236 - DNA, 33 bp, Homo sapien
aaattactgcatatcatgacttacgatgaaatt

SEQ ID NO: 1069237 - DNA, 33 bp, Homo sapien
gatgggcatgaaggaaatggaactttggagata

SEQ ID NO: 1069238 - DNA, 33 bp, Homo sapien
gatgggcatgaaggaagtggaactttggagata

SEQ ID NO: 1069239 - DNA, 33 bp, Homo sapien
aaaccaaaaagttgaacaatcactacaaggaga

SEQ ID NO: 1069240 - DNA, 33 bp, Homo sapien
aaaccaaaaagttgaagaatcactacaaggaga

SEQ ID NO: 1069241 - DNA, 33 bp, Homo sapien
ctacaactatctaaacaggaaactcagacttta

SEQ ID NO: 1069242 - DNA, 33 bp, Homo sapien
ctacaactatctaaacgggaaactcagacttta

SEQ ID NO: 1069243 - DNA, 33 bp, Homo sapien
cttatcccaagatttacgtgacatggttattca

SEQ ID NO: 1069244 - DNA, 33 bp, Homo sapien
cttatcccaagatttatgtgacatggttattca

SEQ ID NO: 1069245 - DNA, 33 bp, Homo sapien
cctcatttctatctccgacctatacacatactc

SEQ ID NO: 1069246 - DNA, 33 bp, Homo sapien
cctcatttctatctcctacctatacacatactc

SEQ ID NO: 1069247 - DNA, 33 bp, Homo sapien
aatacaatattattaaccatactgctcatgctg

SEQ ID NO: 1069248 - DNA, 33 bp, Homo sapien
aatacaatattattaatcatactgctcatgctg

SEQ ID NO: 1069249 - DNA, 33 bp, Homo sapien
attatctttttgatgcactattgaatttagttt

SEQ ID NO: 1069250 - DNA, 33 bp, Homo sapien
attatctttttgatgcgctattgaatttagttt

SEQ ID NO: 1069251 - DNA, 33 bp, Homo sapien
tctctaagaaatcatcacaaaatgggcatctta

SEQ ID NO: 1069252 - DNA, 33 bp, Homo sapien
tctctaagaaatcatcgcaaaatgggcatctta

SEQ ID NO: 1069253 - DNA, 33 bp, Homo sapien
catatttaacttacctaaaacactgaatattct

SEQ ID NO: 1069254 - DNA, 33 bp, Homo sapien
catatttaacttacctgaaacactgaatattct

SEQ ID NO: 1069255 - DNA, 33 bp, Homo sapien
gggttcatggcttgtaccttttggaacagtggg

SEQ ID NO: 1069256 - DNA, 33 bp, Homo sapien
gggttcatggcttgtatcttttggaacagtggg

SEQ ID NO: 1069257 - DNA, 33 bp, Homo sapien
ttttcattcatctagaagaactccctttagaat

SEQ ID NO: 1069258 - DNA, 33 bp, Homo sapien
ttttcattcatctagaggaactccctttagaat

SEQ ID NO: 1069259 - DNA, 33 bp, Homo sapien
cacttcagtttacagacgatgactgcggtcagg

SEQ ID NO: 1069260 - DNA, 33 bp, Homo sapien
cacttcagtttacagatgatgactgcggtcagg

SEQ ID NO: 1069261 - DNA, 33 bp, Homo sapien
ttccaaacaggcgaaacaggaaataaggaagga

SEQ ID NO: 1069262 - DNA, 33 bp, Homo sapien
ttccaaacaggcgaaataggaaataaggaagga

SEQ ID NO: 1069263 - DNA, 33 bp, Homo sapien
taattttcaagtatacgggctctcttcaatgtg

SEQ ID NO: 1069264 - DNA, 33 bp, Homo sapien
taattttcaagtatactggctctcttcaatgtg

SEQ ID NO: 1069265 - DNA, 33 bp, Homo sapien
agatatttgcttgccccatgtatatccatgcct

SEQ ID NO: 1069266 - DNA, 33 bp, Homo sapien
agatatttgcttgccctatgtatatccatgcct

SEQ ID NO: 1069267 - DNA, 33 bp, Homo sapien
aaatgtttttattgaaatacacacaaatagaaa

SEQ ID NO: 1069268 - DNA, 33 bp, Homo sapien
aaatgtttttattgaagtacacacaaatagaaa

SEQ ID NO: 1069269 - DNA, 33 bp, Homo sapien
gagcagataattggagactcaaccactaaatga

SEQ ID NO: 1069270 - DNA, 33 bp, Homo sapien
gagcagataattggaggctcaaccactaaatga

SEQ ID NO: 1069271 - DNA, 33 bp, Homo sapien
tttaataattctatgccgaaatctgatcataat

SEQ ID NO: 1069272 - DNA, 33 bp, Homo sapien
tttaataattctatgctgaaatctgatcataat

SEQ ID NO: 1069273 - DNA, 33 bp, Homo sapien
tgtgcaaaataaaaagacttaagccaatggtat

SEQ ID NO: 1069274 - DNA, 33 bp, Homo sapien
tgtgcaaaataaaaagtcttaagccaatggtat

SEQ ID NO: 1069275 - DNA, 33 bp, Homo sapien
tacagtagctaagagacagatgcaccctaagcg

SEQ ID NO: 1069276 - DNA, 33 bp, Homo sapien
tacagtagctaagagatagatgcaccctaagcg

SEQ ID NO: 1069277 - DNA, 33 bp, Homo sapien
acagatagtagagtggaaaccccttagaaactt

SEQ ID NO: 1069278 - DNA, 33 bp, Homo sapien
acagatagtagagtggcaaccccttagaaactt

SEQ ID NO: 1069279 - DNA, 33 bp, Homo sapien
tggttctgggttagagcctcctgcaactttctg

SEQ ID NO: 1069280 - DNA, 33 bp, Homo sapien
tggttctgggttagaggctcctgcaactttctg

SEQ ID NO: 1069281 - DNA, 33 bp, Homo sapien
ttggcatcccagaaaaataaaatcatgtaggga

SEQ ID NO: 1069282 - DNA, 33 bp, Homo sapien
ttggcatcccagaaaattaaaatcatgtaggga

SEQ ID NO: 1069283 - DNA, 33 bp, Homo sapien
catttcaacaatagaaaagtgaagttcatctga

SEQ ID NO: 1069284 - DNA, 33 bp, Homo sapien
catttcaacaatagaacagtgaagttcatctga

SEQ ID NO: 1069285 - DNA, 33 bp, Homo sapien
ttgggccattacaattaaagccacaaaaaaatc

SEQ ID NO: 1069286 - DNA, 33 bp, Homo sapien
ttgggccattacaattgaagccacaaaaaaatc

SEQ ID NO: 1069287 - DNA, 33 bp, Homo sapien
aacattctaagttacaaagctccacttcctatc

SEQ ID NO: 1069288 - DNA, 33 bp, Homo sapien
aacattctaagttacagagctccacttcctatc

SEQ ID NO: 1069289 - DNA, 33 bp, Homo sapien
gttctagtagcagcgaatagctcccaggcagcc

SEQ ID NO: 1069290 - DNA, 33 bp, Homo sapien
gttctagtagcagcgagtagctcccaggcagcc

SEQ ID NO: 1069291 - DNA, 33 bp, Homo sapien
gagaaataatgccttgaactttactatgtgact

SEQ ID NO: 1069292 - DNA, 33 bp, Homo sapien
gagaaataatgccttggactttactatgtgact

SEQ ID NO: 1069293 - DNA, 33 bp, Homo sapien
ctttaataacaagtcacgtaaattgccgatact

SEQ ID NO: 1069294 - DNA, 33 bp, Homo sapien
ctttaataacaagtcatgtaaattgccgatact

SEQ ID NO: 1069295 - DNA, 33 bp, Homo sapien
ataattgacttctgctcaagaatttgataaaac

SEQ ID NO: 1069296 - DNA, 33 bp, Homo sapien
ataattgacttctgcttaagaatttgataaaac

SEQ ID NO: 1069297 - DNA, 33 bp, Homo sapien
tcttgaagacagtatacggatgggtcttggctc

SEQ ID NO: 1069298 - DNA, 33 bp, Homo sapien
tcttgaagacagtatatggatgggtcttggctc

SEQ ID NO: 1069299 - DNA, 33 bp, Homo sapien
tgcttgtgatttttgcaaactaacgcaggaaca

SEQ ID NO: 1069300 - DNA, 33 bp, Homo sapien
tgcttgtgatttttgcgaactaacgcaggaaca

SEQ ID NO: 1069301 - DNA, 33 bp, Homo sapien
gtcacagtattgtacacgaaatttttactagct

SEQ ID NO: 1069302 - DNA, 33 bp, Homo sapien
gtcacagtattgtacatgaaatttttactagct

SEQ ID NO: 1069303 - DNA, 33 bp, Homo sapien
gcccacatcagcttcacggaagggacatattta

SEQ ID NO: 1069304 - DNA, 33 bp, Homo sapien
gcccacatcagcttcatggaagggacatattta

SEQ ID NO: 1069305 - DNA, 33 bp, Homo sapien
agttaaataacttgtacgaagtctcacagttag

SEQ ID NO: 1069306 - DNA, 33 bp, Homo sapien
agttaaataacttgtatgaagtctcacagttag

SEQ ID NO: 1069307 - DNA, 33 bp, Homo sapien
gaatcataaaaatggcaagagataagaaatgaa

SEQ ID NO: 1069308 - DNA, 33 bp, Homo sapien
gaatcataaaaatggcgagagataagaaatgaa

SEQ ID NO: 1069309 - DNA, 33 bp, Homo sapien
gagatctcatcagccacaacttcattgtgtata

SEQ ID NO: 1069310 - DNA, 33 bp, Homo sapien
gagatctcatcagccagaacttcattgtgtata

SEQ ID NO: 1069311 - DNA, 33 bp, Homo sapien
tataagaaaagttttcaaagagtgtattcgcta

SEQ ID NO: 1069312 - DNA, 33 bp, Homo sapien
tataagaaaagttttccaagagtgtattcgcta

SEQ ID NO: 1069313 - DNA, 33 bp, Homo sapien
tatttgtgatacattgaacattagaaggccaat

SEQ ID NO: 1069314 - DNA, 33 bp, Homo sapien
tatttgtgatacattgcacattagaaggccaat

SEQ ID NO: 1069315 - DNA, 33 bp, Homo sapien
gctcctaccagcacccagaagtactcgtatcgg

SEQ ID NO: 1069316 - DNA, 33 bp, Homo sapien
gctcctaccagcacccggaagtactcgtatcgg

SEQ ID NO: 1069317 - DNA, 33 bp, Homo sapien
aactctttccattaatcatgattacccagttat

SEQ ID NO: 1069318 - DNA, 33 bp, Homo sapien
aactctttccattaattatgattacccagttat

SEQ ID NO: 1069319 - DNA, 33 bp, Homo sapien
gaccttttttgtaagacagaatttgctaactga

SEQ ID NO: 1069320 - DNA, 33 bp, Homo sapien
gaccttttttgtaagagagaatttgctaactga

SEQ ID NO: 1069321 - DNA, 33 bp, Homo sapien
gcttcctctttcttgtgaaggagctacttttga

SEQ ID NO: 1069322 - DNA, 33 bp, Homo sapien
gcttcctctttcttgttaaggagctacttttga

SEQ ID NO: 1069323 - DNA, 33 bp, Homo sapien
ttggaagaggatttaaacagtgtctagaaataa

SEQ ID NO: 1069324 - DNA, 33 bp, Homo sapien
ttggaagaggatttaatcagtgtctagaaataa

SEQ ID NO: 1069325 - DNA, 33 bp, Homo sapien
cctggtaagatgaaaaacactataaacagctta

SEQ ID NO: 1069326 - DNA, 33 bp, Homo sapien
cctggtaagatgaaaagcactataaacagctta

SEQ ID NO: 1069327 - DNA, 33 bp, Homo sapien
tgagaaattctaccaaatatcacgaaagagata

SEQ ID NO: 1069328 - DNA, 33 bp, Homo sapien
tgagaaattctaccaagtatcacgaaagagata

SEQ ID NO: 1069329 - DNA, 33 bp, Homo sapien
tatgatgaaattaaccgattccttgaaataaat

SEQ ID NO: 1069330 - DNA, 33 bp, Homo sapien
tatgatgaaattaacctattccttgaaataaat

SEQ ID NO: 1069331 - DNA, 33 bp, Homo sapien
aattatgccgtatgcccatgctgctgacataag

SEQ ID NO: 1069332 - DNA, 33 bp, Homo sapien
aattatgccgtatgcctatgctgctgacataag

SEQ ID NO: 1069333 - DNA, 33 bp, Homo sapien
gtgattaaatgaatgaaatattggctttggtgt

SEQ ID NO: 1069334 - DNA, 33 bp, Homo sapien
gtgattaaatgaatgagatattggctttggtgt

SEQ ID NO: 1069335 - DNA, 33 bp, Homo sapien
tgaaaaataatttacaacatttcagacttcaca

SEQ ID NO: 1069336 - DNA, 33 bp, Homo sapien
tgaaaaataatttacagcatttcagacttcaca

SEQ ID NO: 1069337 - DNA, 33 bp, Homo sapien
aatattgctaaccttacgagtagaatgaaacca

SEQ ID NO: 1069338 - DNA, 33 bp, Homo sapien
aatattgctaaccttatgagtagaatgaaacca

SEQ ID NO: 1069339 - DNA, 33 bp, Homo sapien
ttttatgttggtagccaaacaatctggtgacgg

SEQ ID NO: 1069340 - DNA, 33 bp, Homo sapien
ttttatgttggtagccgaacaatctggtgacgg

SEQ ID NO: 1069341 - DNA, 33 bp, Homo sapien
ttgtttttaaagatgaagccggtctatcctggc

SEQ ID NO: 1069342 - DNA, 33 bp, Homo sapien
ttgtttttaaagatgaggccggtctatcctggc

SEQ ID NO: 1069343 - DNA, 33 bp, Homo sapien
tctaggctcttctctacgtcatctgaaatccga

SEQ ID NO: 1069344 - DNA, 33 bp, Homo sapien
tctaggctcttctctatgtcatctgaaatccga

SEQ ID NO: 1069345 - DNA, 33 bp, Homo sapien
aatgggtaatgggagaagttgaaagagtttgga

SEQ ID NO: 1069346 - DNA, 33 bp, Homo sapien
aatgggtaatgggagaggttgaaagagtttgga

SEQ ID NO: 1069347 - DNA, 33 bp, Homo sapien
gtgttctctttttaccacatatatgccaatatc

SEQ ID NO: 1069348 - DNA, 33 bp, Homo sapien
gtgttctctttttacctcatatatgccaatatc

SEQ ID NO: 1069349 - DNA, 33 bp, Homo sapien
tttgactagtgtgatacgttatctccttttggt

SEQ ID NO: 1069350 - DNA, 33 bp, Homo sapien
tttgactagtgtgatatgttatctccttttggt

SEQ ID NO: 1069351 - DNA, 33 bp, Homo sapien
gaattgaagagagttacggccttcctttgaatt

SEQ ID NO: 1069352 - DNA, 33 bp, Homo sapien
gaattgaagagagttatggccttcctttgaatt

SEQ ID NO: 1069353 - DNA, 33 bp, Homo sapien
aatagtacataatttcacttagcaacatagggt

SEQ ID NO: 1069354 - DNA, 33 bp, Homo sapien
aatagtacataatttcgcttagcaacatagggt

SEQ ID NO: 1069355 - DNA, 33 bp, Homo sapien
gactccttgctattaacgtatgcattttgagat

SEQ ID NO: 1069356 - DNA, 33 bp, Homo sapien
gactccttgctattaatgtatgcattttgagat

SEQ ID NO: 1069357 - DNA, 33 bp, Homo sapien
tctttacagagttgacaatagtttagctaagtt

SEQ ID NO: 1069358 - DNA, 33 bp, Homo sapien
tctttacagagttgacgatagtttagctaagtt

SEQ ID NO: 1069359 - DNA, 33 bp, Homo sapien
tttttgtttttggaaaaaatgagtatggccagc

SEQ ID NO: 1069360 - DNA, 33 bp, Homo sapien
tttttgtttttggaaacaatgagtatggccagc

SEQ ID NO: 1069361 - DNA, 33 bp, Homo sapien
gcttctatccaagagacccattgatttagttat

SEQ ID NO: 1069362 - DNA, 33 bp, Homo sapien
gcttctatccaagagatccattgatttagttat

SEQ ID NO: 1069363 - DNA, 33 bp, Homo sapien
tgcctttaactgaagaccatttgactatattaa

SEQ ID NO: 1069364 - DNA, 33 bp, Homo sapien
tgcctttaactgaagatcatttgactatattaa

SEQ ID NO: 1069365 - DNA, 33 bp, Homo sapien
tgactaaacggctcttcaaagcagaacccaggc

SEQ ID NO: 1069366 - DNA, 33 bp, Homo sapien
tgactaaacggctcttgaaagcagaacccaggc

SEQ ID NO: 1069367 - DNA, 33 bp, Homo sapien
tcagctattacattagcattgttgttcttttca

SEQ ID NO: 1069368 - DNA, 33 bp, Homo sapien
tcagctattacattaggattgttgttcttttca

SEQ ID NO: 1069369 - DNA, 33 bp, Homo sapien
tttttcaacttacatcaaaatgcaaaaacccaa

SEQ ID NO: 1069370 - DNA, 33 bp, Homo sapien
tttttcaacttacatcgaaatgcaaaaacccaa

SEQ ID NO: 1069371 - DNA, 33 bp, Homo sapien
gaagtatttctctggcactctactttgttttat

SEQ ID NO: 1069372 - DNA, 33 bp, Homo sapien
gaagtatttctctggcgctctactttgttttat

SEQ ID NO: 1069373 - DNA, 33 bp, Homo sapien
caagctttgggcgccactgcattccccagtgcc

SEQ ID NO: 1069374 - DNA, 33 bp, Homo sapien
caagctttgggcgccagtgcattccccagtgcc

SEQ ID NO: 1069375 - DNA, 33 bp, Homo sapien
gctaataagtgactgccacatttgaatccaatt

SEQ ID NO: 1069376 - DNA, 33 bp, Homo sapien
gctaataagtgactgctacatttgaatccaatt

SEQ ID NO: 1069377 - DNA, 33 bp, Homo sapien
ttcgatgatgaataggaaaattgtatagcttta

SEQ ID NO: 1069378 - DNA, 33 bp, Homo sapien
ttcgatgatgaatagggaaattgtatagcttta

SEQ ID NO: 1069379 - DNA, 33 bp, Homo sapien
catggtaatataaataggatttgtcacttcatt

SEQ ID NO: 1069380 - DNA, 33 bp, Homo sapien
catggtaatataaatatgatttgtcacttcatt

SEQ ID NO: 1069381 - DNA, 33 bp, Homo sapien
atcaaataaactttcacagccctagaaaccaaa

SEQ ID NO: 1069382 - DNA, 33 bp, Homo sapien
atcaaataaactttcatagccctagaaaccaaa

SEQ ID NO: 1069383 - DNA, 33 bp, Homo sapien
tataagggataatcacaactctagacatcccta

SEQ ID NO: 1069384 - DNA, 33 bp, Homo sapien
tataagggataatcacgactctagacatcccta

SEQ ID NO: 1069385 - DNA, 33 bp, Homo sapien
ctgattgactagagtaagttcaagagtcaaaat

SEQ ID NO: 1069386 - DNA, 33 bp, Homo sapien
ctgattgactagagtaggttcaagagtcaaaat

SEQ ID NO: 1069387 - DNA, 33 bp, Homo sapien
atcagttattctgttaaacttactaaactgtag

SEQ ID NO: 1069388 - DNA, 33 bp, Homo sapien
atcagttattctgttacacttactaaactgtag

SEQ ID NO: 1069389 - DNA, 33 bp, Homo sapien
atgtgcctttagagaacaatatttaaataaaat

SEQ ID NO: 1069390 - DNA, 33 bp, Homo sapien
atgtgcctttagagaagaatatttaaataaaat

SEQ ID NO: 1069391 - DNA, 33 bp, Homo sapien
cttatagcagagtaaacaatgatcagaatccag

SEQ ID NO: 1069392 - DNA, 33 bp, Homo sapien
cttatagcagagtaaagaatgatcagaatccag

SEQ ID NO: 1069393 - DNA, 33 bp, Homo sapien
tgggatcactgtctcaagtcaagctgtgtattt

SEQ ID NO: 1069394 - DNA, 33 bp, Homo sapien
tgggatcactgtctcacgtcaagctgtgtattt

SEQ ID NO: 1069395 - DNA, 33 bp, Homo sapien
gggacggatcattaacagggggaattgaggctg

SEQ ID NO: 1069396 - DNA, 33 bp, Homo sapien
gggacggatcattaactgggggaattgaggctg

SEQ ID NO: 1069397 - DNA, 33 bp, Homo sapien
agttctaaaaagataaatctacgcctcacactt

SEQ ID NO: 1069398 - DNA, 33 bp, Homo sapien
agttctaaaaagataagtctacgcctcacactt

SEQ ID NO: 1069399 - DNA, 33 bp, Homo sapien
atattccctgattccaatcaattttttctcact

SEQ ID NO: 1069400 - DNA, 33 bp, Homo sapien
atattccctgattccagtcaattttttctcact

SEQ ID NO: 1069401 - DNA, 33 bp, Homo sapien
gcttttattggctctacgtatcaaccttgattc

SEQ ID NO: 1069402 - DNA, 33 bp, Homo sapien
gcttttattggctctatgtatcaaccttgattc

SEQ ID NO: 1069403 - DNA, 33 bp, Homo sapien
aatcactgacttttgacgactatggatctccag

SEQ ID NO: 1069404 - DNA, 33 bp, Homo sapien
aatcactgacttttgatgactatggatctccag

SEQ ID NO: 1069405 - DNA, 33 bp, Homo sapien
acaagatgtattaatcaacaaagtcattgtctt

SEQ ID NO: 1069406 - DNA, 33 bp, Homo sapien
acaagatgtattaatccacaaagtcattgtctt

SEQ ID NO: 1069407 - DNA, 33 bp, Homo sapien
tgtggctcaaatcataaccagcaagcaaacaag

SEQ ID NO: 1069408 - DNA, 33 bp, Homo sapien
tgtggctcaaatcatacccagcaagcaaacaag

SEQ ID NO: 1069409 - DNA, 33 bp, Homo sapien
tgggatgacttttttcacagtgatagatcattg

SEQ ID NO: 1069410 - DNA, 33 bp, Homo sapien
tgggatgacttttttcgcagtgatagatcattg

SEQ ID NO: 1069411 - DNA, 33 bp, Homo sapien
tataaattaatctctcagacaatcccgttatag

SEQ ID NO: 1069412 - DNA, 33 bp, Homo sapien
tataaattaatctctctgacaatcccgttatag

SEQ ID NO: 1069413 - DNA, 33 bp, Homo sapien
ccatgtaggcttataactcatttctatgattcc

SEQ ID NO: 1069414 - DNA, 33 bp, Homo sapien
ccatgtaggcttataattcatttctatgattcc

SEQ ID NO: 1069415 - DNA, 33 bp, Homo sapien
aaggacttgattcttagagcttcatttaattca

SEQ ID NO: 1069416 - DNA, 33 bp, Homo sapien
aaggacttgattcttatagcttcatttaattca

SEQ ID NO: 1069417 - DNA, 33 bp, Homo sapien
ttttggcaaaaagaagaatgatgtattggcaac

SEQ ID NO: 1069418 - DNA, 33 bp, Homo sapien
ttttggcaaaaagaaggatgatgtattggcaac

SEQ ID NO: 1069419 - DNA, 33 bp, Homo sapien
ttcacatggagtcttacgtaatcttctcaacaa

SEQ ID NO: 1069420 - DNA, 33 bp, Homo sapien
ttcacatggagtcttatgtaatcttctcaacaa

SEQ ID NO: 1069421 - DNA, 33 bp, Homo sapien
aaacaataacatcatacgaaagaaggacatcat

SEQ ID NO: 1069422 - DNA, 33 bp, Homo sapien
aaacaataacatcatatgaaagaaggacatcat

SEQ ID NO: 1069423 - DNA, 33 bp, Homo sapien
cagttgtattgtcaaaataatgccctattccca

SEQ ID NO: 1069424 - DNA, 33 bp, Homo sapien
cagttgtattgtcaaactaatgccctattccca

SEQ ID NO: 1069425 - DNA, 33 bp, Homo sapien
agctttcaccatcttacgcaaagtggcatattt

SEQ ID NO: 1069426 - DNA, 33 bp, Homo sapien
agctttcaccatcttatgcaaagtggcatattt

SEQ ID NO: 1069427 - DNA, 33 bp, Homo sapien
tcctctctgccttgctaaccctccagttatcca

SEQ ID NO: 1069428 - DNA, 33 bp, Homo sapien
tcctctctgccttgcttaccctccagttatcca

SEQ ID NO: 1069429 - DNA, 33 bp, Homo sapien
actgagttcttaccataagttagctctaggaaa

SEQ ID NO: 1069430 - DNA, 33 bp, Homo sapien
actgagttcttaccatgagttagctctaggaaa

SEQ ID NO: 1069431 - DNA, 33 bp, Homo sapien
ataaatattttctccaactccagtagtgacaac

SEQ ID NO: 1069432 - DNA, 33 bp, Homo sapien
ataaatattttctccatctccagtagtgacaac

SEQ ID NO: 1069433 - DNA, 33 bp, Homo sapien
tacttgtaaagccagtaaaaatttatttgaaaa

SEQ ID NO: 1069434 - DNA, 33 bp, Homo sapien
tacttgtaaagccagtgaaaatttatttgaaaa

SEQ ID NO: 1069435 - DNA, 33 bp, Homo sapien
aaaatacacgttgtacaatggttaatacctggt

SEQ ID NO: 1069436 - DNA, 33 bp, Homo sapien
aaaatacacgttgtacgatggttaatacctggt

SEQ ID NO: 1069437 - DNA, 33 bp, Homo sapien
agcaccattaactaaccggacataattgacatt

SEQ ID NO: 1069438 - DNA, 33 bp, Homo sapien
agcaccattaactaactggacataattgacatt

SEQ ID NO: 1069439 - DNA, 33 bp, Homo sapien
atgattcaaaaacacacgcattgttatagtaca

SEQ ID NO: 1069440 - DNA, 33 bp, Homo sapien
atgattcaaaaacacaggcattgttatagtaca

SEQ ID NO: 1069441 - DNA, 33 bp, Homo sapien
gggtgcctggaatatacgcaataacaaaatagg

SEQ ID NO: 1069442 - DNA, 33 bp, Homo sapien
gggtgcctggaatatatgcaataacaaaatagg

SEQ ID NO: 1069443 - DNA, 33 bp, Homo sapien
ggaaatttaaaaaaaacgtatgcaagaatgcag

SEQ ID NO: 1069444 - DNA, 33 bp, Homo sapien
ggaaatttaaaaaaaatgtatgcaagaatgcag

SEQ ID NO: 1069445 - DNA, 33 bp, Homo sapien
agatctagatatttgacaccttagcacttcaga

SEQ ID NO: 1069446 - DNA, 33 bp, Homo sapien
agatctagatatttgataccttagcacttcaga

SEQ ID NO: 1069447 - DNA, 33 bp, Homo sapien
aatcatgagactcagaatacagcttgaggaaca

SEQ ID NO: 1069448 - DNA, 33 bp, Homo sapien
aatcatgagactcagagtacagcttgaggaaca

SEQ ID NO: 1069449 - DNA, 33 bp, Homo sapien
gtcctttagagagccacaagacaagtcaaagcc

SEQ ID NO: 1069450 - DNA, 33 bp, Homo sapien
gtcctttagagagccagaagacaagtcaaagcc

SEQ ID NO: 1069451 - DNA, 33 bp, Homo sapien
aagacaacaggctactcaaaatcttgggagaag

SEQ ID NO: 1069452 - DNA, 33 bp, Homo sapien
aagacaacaggctacttaaaatcttgggagaag

SEQ ID NO: 1069453 - DNA, 33 bp, Homo sapien
aaaaaagatgtaaaaaggtatgtcctgcagcca

SEQ ID NO: 1069454 - DNA, 33 bp, Homo sapien
aaaaaagatgtaaaaatgtatgtcctgcagcca

SEQ ID NO: 1069455 - DNA, 33 bp, Homo sapien
ttagcaactcatgggacctttatatttttgaaa

SEQ ID NO: 1069456 - DNA, 33 bp, Homo sapien
ttagcaactcatgggatctttatatttttgaaa

SEQ ID NO: 1069457 - DNA, 33 bp, Homo sapien
cagcatccttttataacacaaactctcaacaaa

SEQ ID NO: 1069458 - DNA, 33 bp, Homo sapien
cagcatccttttataatacaaactctcaacaaa

SEQ ID NO: 1069459 - DNA, 33 bp, Homo sapien
atttcatctaacatgacgtaactaagctgtgta

SEQ ID NO: 1069460 - DNA, 33 bp, Homo sapien
atttcatctaacatgatgtaactaagctgtgta

SEQ ID NO: 1069461 - DNA, 33 bp, Homo sapien
gcccttgagcactcacagggttattttggcttg

SEQ ID NO: 1069462 - DNA, 33 bp, Homo sapien
gcccttgagcactcacggggttattttggcttg

SEQ ID NO: 1069463 - DNA, 33 bp, Homo sapien
ctggtgttggtacacacgtgatctgtctatagt

SEQ ID NO: 1069464 - DNA, 33 bp, Homo sapien
ctggtgttggtacacatgtgatctgtctatagt

SEQ ID NO: 1069465 - DNA, 33 bp, Homo sapien
tccagattctggctccaagtttgtgctgtatac

SEQ ID NO: 1069466 - DNA, 33 bp, Homo sapien
tccagattctggctccgagtttgtgctgtatac

SEQ ID NO: 1069467 - DNA, 33 bp, Homo sapien
gtcacaggtaaaaccagaaaggagctaataaaa

SEQ ID NO: 1069468 - DNA, 33 bp, Homo sapien
gtcacaggtaaaaccataaaggagctaataaaa

SEQ ID NO: 1069469 - DNA, 33 bp, Homo sapien
taatgccagaagtgcaatgatttgtagagctac

SEQ ID NO: 1069470 - DNA, 33 bp, Homo sapien
taatgccagaagtgcactgatttgtagagctac

SEQ ID NO: 1069471 - DNA, 33 bp, Homo sapien
tgccaccatcttggaaatgaccaaccgccattt

SEQ ID NO: 1069472 - DNA, 33 bp, Homo sapien
tgccaccatcttggaagtgaccaaccgccattt

SEQ ID NO: 1069473 - DNA, 33 bp, Homo sapien
ctgttcttgcattactaaatattacacctaaga

SEQ ID NO: 1069474 - DNA, 33 bp, Homo sapien
ctgttcttgcattactgaatattacacctaaga

SEQ ID NO: 1069475 - DNA, 33 bp, Homo sapien
attcaatagtgggaaccgaagtttagccaaatt

SEQ ID NO: 1069476 - DNA, 33 bp, Homo sapien
attcaatagtgggaactgaagtttagccaaatt

SEQ ID NO: 1069477 - DNA, 33 bp, Homo sapien
caagcataataattcacaggctactccttccat

SEQ ID NO: 1069478 - DNA, 33 bp, Homo sapien
caagcataataattcagaggctactccttccat

SEQ ID NO: 1069479 - DNA, 33 bp, Homo sapien
ataacgttattattgccaatggtcacagacacc

SEQ ID NO: 1069480 - DNA, 33 bp, Homo sapien
ataacgttattattgctaatggtcacagacacc

SEQ ID NO: 1069481 - DNA, 33 bp, Homo sapien
cattggtccatatatacgcttttatgctggtat

SEQ ID NO: 1069482 - DNA, 33 bp, Homo sapien
cattggtccatatatatgcttttatgctggtat

SEQ ID NO: 1069483 - DNA, 33 bp, Homo sapien
ttaaggcttccattcaagaacaaaggatgtctc

SEQ ID NO: 1069484 - DNA, 33 bp, Homo sapien
ttaaggcttccattcatgaacaaaggatgtctc

SEQ ID NO: 1069485 - DNA, 33 bp, Homo sapien
tttaattgagtctaaaagcacacaggtcacaca

SEQ ID NO: 1069486 - DNA, 33 bp, Homo sapien
tttaattgagtctaaaggcacacaggtcacaca

SEQ ID NO: 1069487 - DNA, 33 bp, Homo sapien
tgtgatggaagacctcagaagtttgtcaaatat

SEQ ID NO: 1069488 - DNA, 33 bp, Homo sapien
tgtgatggaagacctccgaagtttgtcaaatat

SEQ ID NO: 1069489 - DNA, 33 bp, Homo sapien
ctagagatctgttatacagcattgttcctagag

SEQ ID NO: 1069490 - DNA, 33 bp, Homo sapien
ctagagatctgttatatagcattgttcctagag

SEQ ID NO: 1069491 - DNA, 33 bp, Homo sapien
aattactcaggtaagaggtactggtgattacaa

SEQ ID NO: 1069492 - DNA, 33 bp, Homo sapien
aattactcaggtaagatgtactggtgattacaa

SEQ ID NO: 1069493 - DNA, 33 bp, Homo sapien
aattattctataatgccctccctagttggaacc

SEQ ID NO: 1069494 - DNA, 33 bp, Homo sapien
aattattctataatgctctccctagttggaacc

SEQ ID NO: 1069495 - DNA, 33 bp, Homo sapien
atgaaaacatcaatgaaaattaccactctagga

SEQ ID NO: 1069496 - DNA, 33 bp, Homo sapien
atgaaaacatcaatgagaattaccactctagga

SEQ ID NO: 1069497 - DNA, 33 bp, Homo sapien
aagtatccttcagaaagtcccttaagaaagaaa

SEQ ID NO: 1069498 - DNA, 33 bp, Homo sapien
aagtatccttcagaaattcccttaagaaagaaa

SEQ ID NO: 1069499 - DNA, 33 bp, Homo sapien
cactagacaagtgagaacatttctgagtgtaag

SEQ ID NO: 1069500 - DNA, 33 bp, Homo sapien
cactagacaagtgagagcatttctgagtgtaag

SEQ ID NO: 1069501 - DNA, 33 bp, Homo sapien
tcatgtcttgtttctgcaggtgcttgaagccac

SEQ ID NO: 1069502 - DNA, 33 bp, Homo sapien
tcatgtcttgtttctgtaggtgcttgaagccac

SEQ ID NO: 1069503 - DNA, 33 bp, Homo sapien
actaattattctcttcaaagtaatagacaccat

SEQ ID NO: 1069504 - DNA, 33 bp, Homo sapien
actaattattctcttcgaagtaatagacaccat

SEQ ID NO: 1069505 - DNA, 33 bp, Homo sapien
cccccgatagacttgaaccctctgaatttcaga

SEQ ID NO: 1069506 - DNA, 33 bp, Homo sapien
cccccgatagacttgatccctctgaatttcaga

SEQ ID NO: 1069507 - DNA, 33 bp, Homo sapien
agtagtaatattacaaagagtggatacactcat

SEQ ID NO: 1069508 - DNA, 33 bp, Homo sapien
agtagtaatattacaaggagtggatacactcat

SEQ ID NO: 1069509 - DNA, 33 bp, Homo sapien; identical to SEQ ID NO: 1069507

SEQ ID NO: 1069510 - DNA, 33 bp, Homo sapien; identical to SEQ ID NO: 1069508

SEQ ID NO: 1069511 - DNA, 33 bp, Homo sapien
ctgaactcagctaacacccactcatgaagggag

SEQ ID NO: 1069512 - DNA, 33 bp, Homo sapien
ctgaactcagctaacagccactcatgaagggag

SEQ ID NO: 1069513 - DNA, 33 bp, Homo sapien
tcatgcaaattgtccaaaaagtcttcacatcaa

SEQ ID NO: 1069514 - DNA, 33 bp, Homo sapien
tcatgcaaattgtccagaaagtcttcacatcaa

SEQ ID NO: 1069515 - DNA, 33 bp, Homo sapien
aggacaaattgggaataacagaaataaacataa

SEQ ID NO: 1069516 - DNA, 33 bp, Homo sapien
aggacaaattgggaattacagaaataaacataa

SEQ ID NO: 1069517 - DNA, 33 bp, Homo sapien
tgtgatttagtttcaacgttgtctatactatcc

SEQ ID NO: 1069518 - DNA, 33 bp, Homo sapien
tgtgatttagtttcaatgttgtctatactatcc

SEQ ID NO: 1069519 - DNA, 33 bp, Homo sapien
aattctgttttatacaatctagggaagggaagc

SEQ ID NO: 1069520 - DNA, 33 bp, Homo sapien
aattctgttttatacattctagggaagggaagc

SEQ ID NO: 1069521 - DNA, 33 bp, Homo sapien
tactctgtcattctataagtccattcatacaaa

SEQ ID NO: 1069522 - DNA, 33 bp, Homo sapien
tactctgtcattctatgagtccattcatacaaa

SEQ ID NO: 1069523 - DNA, 33 bp, Homo sapien
actaaatccagtggcacatcgaagagttaattc

SEQ ID NO: 1069524 - DNA, 33 bp, Homo sapien
actaaatccagtggcatatcgaagagttaattc

SEQ ID NO: 1069525 - DNA, 33 bp, Homo sapien
caaaaattcgctgagaataaacatgtaaaccta

SEQ ID NO: 1069526 - DNA, 33 bp, Homo sapien
caaaaattcgctgagagtaaacatgtaaaccta

SEQ ID NO: 1069527 - DNA, 33 bp, Homo sapien
gatcttctccaaagtaagaaacaaattattgca

SEQ ID NO: 1069528 - DNA, 33 bp, Homo sapien
gatcttctccaaagtaggaaacaaattattgca

SEQ ID NO: 1069529 - DNA, 33 bp, Homo sapien
gccagttcaatactgaccctgttcattggcatt

SEQ ID NO: 1069530 - DNA, 33 bp, Homo sapien
gccagttcaatactgatcctgttcattggcatt

SEQ ID NO: 1069531 - DNA, 33 bp, Homo sapien
agccaatgtagagttaaggctgtttcttcagag

SEQ ID NO: 1069532 - DNA, 33 bp, Homo sapien
agccaatgtagagttagggctgtttcttcagag

SEQ ID NO: 1069533 - DNA, 33 bp, Homo sapien
atcaagtacttacaagaagcaaggagctaggtg

SEQ ID NO: 1069534 - DNA, 33 bp, Homo sapien
atcaagtacttacaagcagcaaggagctaggtg

SEQ ID NO: 1069535 - DNA, 33 bp, Homo sapien
agccagtgtgtaagaacaggatacaaggaggta

SEQ ID NO: 1069536 - DNA, 33 bp, Homo sapien
agccagtgtgtaagaataggatacaaggaggta

SEQ ID NO: 1069537 - DNA, 33 bp, Homo sapien
tgcaagttcattacgtaaatatattgtgtgatt

SEQ ID NO: 1069538 - DNA, 33 bp, Homo sapien
tgcaagttcattacgttaatatattgtgtgatt

SEQ ID NO: 1069539 - DNA, 33 bp, Homo sapien
tgcctacttgagataacgtaactgcatttcttt

SEQ ID NO: 1069540 - DNA, 33 bp, Homo sapien
tgcctacttgagataatgtaactgcatttcttt

SEQ ID NO: 1069541 - DNA, 33 bp, Homo sapien
tttgaggagttcagtacaatgagagagaatgtc

SEQ ID NO: 1069542 - DNA, 33 bp, Homo sapien
tttgaggagttcagtagaatgagagagaatgtc

SEQ ID NO: 1069543 - DNA, 33 bp, Homo sapien
agaacttgaaatggaaataccaattggcccagc

SEQ ID NO: 1069544 - DNA, 33 bp, Homo sapien
agaacttgaaatggaactaccaattggcccagc

SEQ ID NO: 1069545 - DNA, 33 bp, Homo sapien
cagcgttttactctcaatcttgacaacaagctc

SEQ ID NO: 1069546 - DNA, 33 bp, Homo sapien
cagcgttttactctcagtcttgacaacaagctc

SEQ ID NO: 1069547 - DNA, 33 bp, Homo sapien
cagtaatttgatgttaagcaacttttgatacat

SEQ ID NO: 1069548 - DNA, 33 bp, Homo sapien
cagtaatttgatgttaggcaacttttgatacat

SEQ ID NO: 1069549 - DNA, 33 bp, Homo sapien
ctgggatgcagcccaaaaatttgtatgattaac

SEQ ID NO: 1069550 - DNA, 33 bp, Homo sapien
ctgggatgcagcccaagaatttgtatgattaac

SEQ ID NO: 1069551 - DNA, 33 bp, Homo sapien
ctgcctagggtccactcaatgacaattttccaa

SEQ ID NO: 1069552 - DNA, 33 bp, Homo sapien
ctgcctagggtccacttaatgacaattttccaa

SEQ ID NO: 1069553 - DNA, 33 bp, Homo sapien
cctgactgactttctaaaaatttgttcagcttc

SEQ ID NO: 1069554 - DNA, 33 bp, Homo sapien
cctgactgactttctacaaatttgttcagcttc

SEQ ID NO: 1069555 - DNA, 33 bp, Homo sapien
ccaaaatcacagactaggttaagttggaaagat

SEQ ID NO: 1069556 - DNA, 33 bp, Homo sapien
ccaaaatcacagactatgttaagttggaaagat

SEQ ID NO: 1069557 - DNA, 33 bp, Homo sapien
atatcttggagctagaaatattttatggcatcc

SEQ ID NO: 1069558 - DNA, 33 bp, Homo sapien
atatcttggagctagatatattttatggcatcc

SEQ ID NO: 1069559 - DNA, 33 bp, Homo sapien
agtaatgtttcttccacaatagttagttgtgtt

SEQ ID NO: 1069560 - DNA, 33 bp, Homo sapien
agtaatgtttcttccagaatagttagttgtgtt

SEQ ID NO: 1069561 - DNA, 33 bp, Homo sapien
gattgtaaaaatgataacttatacagctgttat

SEQ ID NO: 1069562 - DNA, 33 bp, Homo sapien
gattgtaaaaatgataccttatacagctgttat

SEQ ID NO: 1069563 - DNA, 33 bp, Homo sapien
tatcagaagtaagcacactatctatggcacatg

SEQ ID NO: 1069564 - DNA, 33 bp, Homo sapien
tatcagaagtaagcacgctatctatggcacatg

SEQ ID NO: 1069565 - DNA, 33 bp, Homo sapien
aatgttttgaggaagtcactgatgttggaaaca

SEQ ID NO: 1069566 - DNA, 33 bp, Homo sapien
aatgttttgaggaagttactgatgttggaaaca

SEQ ID NO: 1069567 - DNA, 33 bp, Homo sapien
gtttgttgatagaataaaggaggaaaaccagca

SEQ ID NO: 1069568 - DNA, 33 bp, Homo sapien
gtttgttgatagaatagaggaggaaaaccagca

SEQ ID NO: 1069569 - DNA, 33 bp, Homo sapien
aaacatagaaagtgaacagtgcaacagggaaat

SEQ ID NO: 1069570 - DNA, 33 bp, Homo sapien
aaacatagaaagtgaatagtgcaacagggaaat

SEQ ID NO: 1069571 - DNA, 33 bp, Homo sapien
ctgcaactatttactacgacttagtggcttaag

SEQ ID NO: 1069572 - DNA, 33 bp, Homo sapien
ctgcaactatttactatgacttagtggcttaag

SEQ ID NO: 1069573 - DNA, 33 bp, Homo sapien
agccacttgattttcaacttggtttgtatggaa

SEQ ID NO: 1069574 - DNA, 33 bp, Homo sapien
agccacttgattttcatcttggtttgtatggaa

SEQ ID NO: 1069575 - DNA, 33 bp, Homo sapien
acagaaattcctatcaacactggcaggcaggtg

SEQ ID NO: 1069576 - DNA, 33 bp, Homo sapien
acagaaattcctatcatcactggcaggcaggtg

SEQ ID NO: 1069577 - DNA, 33 bp, Homo sapien
gtagtgctgagatgagcatgtgttttgaaatga

SEQ ID NO: 1069578 - DNA, 33 bp, Homo sapien
gtagtgctgagatgagtatgtgttttgaaatga

SEQ ID NO: 1069579 - DNA, 33 bp, Homo sapien
gaggagatgaggatgacgagaggttgcttatca

SEQ ID NO: 1069580 - DNA, 33 bp, Homo sapien
gaggagatgaggatgaggagaggttgcttatca

SEQ ID NO: 1069581 - DNA, 33 bp, Homo sapien
aaattatcctttgaacaatcttgtgagatgtgt

SEQ ID NO: 1069582 - DNA, 33 bp, Homo sapien
aaattatcctttgaacgatcttgtgagatgtgt

SEQ ID NO: 1069583 - DNA, 33 bp, Homo sapien
cacatggttattgtgaaggattccagagatact

SEQ ID NO: 1069584 - DNA, 33 bp, Homo sapien
cacatggttattgtgagggattccagagatact

SEQ ID NO: 1069585 - DNA, 33 bp, Homo sapien
gatatacacgtcaatacagagaagattgtatct

SEQ ID NO: 1069586 - DNA, 33 bp, Homo sapien
gatatacacgtcaatatagagaagattgtatct

SEQ ID NO: 1069587 - DNA, 33 bp, Homo sapien
gtcagactctgttaacaggatgaaaggttaagc

SEQ ID NO: 1069588 - DNA, 33 bp, Homo sapien
gtcagactctgttaacgggatgaaaggttaagc

SEQ ID NO: 1069589 - DNA, 33 bp, Homo sapien
agcatttctatatgacaacagtgtacaatatga

SEQ ID NO: 1069590 - DNA, 33 bp, Homo sapien
agcatttctatatgaccacagtgtacaatatga

SEQ ID NO: 1069591 - DNA, 33 bp, Homo sapien
tttttcaacatcatttaaaacgatcatatggtt

SEQ ID NO: 1069592 - DNA, 33 bp, Homo sapien
tttttcaacatcatttgaaacgatcatatggtt

SEQ ID NO: 1069593 - DNA, 33 bp, Homo sapien
tgcttctgaatgataaatgagtcaaaaaaatca

SEQ ID NO: 1069594 - DNA, 33 bp, Homo sapien
tgcttctgaatgataagtgagtcaaaaaaatca

SEQ ID NO: 1069595 - DNA, 33 bp, Homo sapien
tctccattattattgacgcagggaagtcttgcc

SEQ ID NO: 1069596 - DNA, 33 bp, Homo sapien
tctccattattattgatgcagggaagtcttgcc

SEQ ID NO: 1069597 - DNA, 33 bp, Homo sapien
agtcggtacttacaacaaaagaagaactaactg

SEQ ID NO: 1069598 - DNA, 33 bp, Homo sapien
agtcggtacttacaaccaaagaagaactaactg

SEQ ID NO: 1069599 - DNA, 33 bp, Homo sapien
tgtgtcctctctctgtcacagaactgccttgaa

SEQ ID NO: 1069600 - DNA, 33 bp, Homo sapien
tgtgtcctctctctgttacagaactgccttgaa

SEQ ID NO: 1069601 - DNA, 33 bp, Homo sapien
gaggaaagaaaggatacgttagccggaactcaa

SEQ ID NO: 1069602 - DNA, 33 bp, Homo sapien
gaggaaagaaaggatatgttagccggaactcaa

SEQ ID NO: 1069603 - DNA, 33 bp, Homo sapien
ttatcctagtcttgccacaatgactgaaatacc

SEQ ID NO: 1069604 - DNA, 33 bp, Homo sapien
ttatcctagtcttgccgcaatgactgaaatacc

SEQ ID NO: 1069605 - DNA, 33 bp, Homo sapien
gtcatttgaatcagtgaaatgaatacgaaagac

SEQ ID NO: 1069606 - DNA, 33 bp, Homo sapien
gtcatttgaatcagtggaatgaatacgaaagac

SEQ ID NO: 1069607 - DNA, 33 bp, Homo sapien
attctctattccatacactgcaagtcttaaatg

SEQ ID NO: 1069608 - DNA, 33 bp, Homo sapien
attctctattccatacgctgcaagtcttaaatg

SEQ ID NO: 1069609 - DNA, 33 bp, Homo sapien
caactataattttgtacctgttgaccaaccttt

SEQ ID NO: 1069610 - DNA, 33 bp, Homo sapien
caactataattttgtatctgttgaccaaccttt

SEQ ID NO: 1069611 - DNA, 33 bp, Homo sapien
tcacaaagctaatgaaaaacagagtcaggacta

SEQ ID NO: 1069612 - DNA, 33 bp, Homo sapien
tcacaaagctaatgaacaacagagtcaggacta

SEQ ID NO: 1069613 - DNA, 33 bp, Homo sapien
aagggaaggacatacaactataaaataatggag

SEQ ID NO: 1069614 - DNA, 33 bp, Homo sapien
aagggaaggacatacatctataaaataatggag

SEQ ID NO: 1069615 - DNA, 33 bp, Homo sapien
gtttttccagcattcaccaatctgtggcaggag

SEQ ID NO: 1069616 - DNA, 33 bp, Homo sapien
gtttttccagcattcatcaatctgtggcaggag

SEQ ID NO: 1069617 - DNA, 33 bp, Homo sapien
ggtggtattccaagacgcaggtgagcaaagaga

SEQ ID NO: 1069618 - DNA, 33 bp, Homo sapien
ggtggtattccaagactcaggtgagcaaagaga

SEQ ID NO: 1069619 - DNA, 33 bp, Homo sapien
aacatacaatcctacccaaaccatgaactctgg

SEQ ID NO: 1069620 - DNA, 33 bp, Homo sapien
aacatacaatcctaccgaaaccatgaactctgg

SEQ ID NO: 1069621 - DNA, 33 bp, Homo sapien
tagaataagtaagttccaatactttgctcatag

SEQ ID NO: 1069622 - DNA, 33 bp, Homo sapien
tagaataagtaagttctaatactttgctcatag

SEQ ID NO: 1069623 - DNA, 33 bp, Homo sapien
atgcctgttttcctgaggtatgcattatagcat

SEQ ID NO: 1069624 - DNA, 33 bp, Homo sapien
atgcctgttttcctgatgtatgcattatagcat

SEQ ID NO: 1069625 - DNA, 33 bp, Homo sapien
gtacctaggttctcaacatacttcatcagtttt

SEQ ID NO: 1069626 - DNA, 33 bp, Homo sapien
gtacctaggttctcaatatacttcatcagtttt

SEQ ID NO: 1069627 - DNA, 33 bp, Homo sapien
attttttacaattcaccatgctatgtatttcat

SEQ ID NO: 1069628 - DNA, 33 bp, Homo sapien
attttttacaattcactatgctatgtatttcat

SEQ ID NO: 1069629 - DNA, 33 bp, Homo sapien
ttcaacaggatgaataagaaaggtctccgtgag

SEQ ID NO: 1069630 - DNA, 33 bp, Homo sapien
ttcaacaggatgaataggaaaggtctccgtgag

SEQ ID NO: 1069631 - DNA, 33 bp, Homo sapien
atattatttgtgagaaagcagatgtaaaaaaag

SEQ ID NO: 1069632 - DNA, 33 bp, Homo sapien
atattatttgtgagaaggcagatgtaaaaaaag

SEQ ID NO: 1069633 - DNA, 33 bp, Homo sapien
tatttcttgattccaaaggtatagctgagctgt

SEQ ID NO: 1069634 - DNA, 33 bp, Homo sapien
tatttcttgattccaacggtatagctgagctgt

SEQ ID NO: 1069635 - DNA, 33 bp, Homo sapien
ctttgatgtaacaaaccgaagcatatagggaaa

SEQ ID NO: 1069636 - DNA, 33 bp, Homo sapien
ctttgatgtaacaaactgaagcatatagggaaa

SEQ ID NO: 1069637 - DNA, 33 bp, Homo sapien
atgatacttttctgaacgggcagtatagtctag

SEQ ID NO: 1069638 - DNA, 33 bp, Homo sapien
atgatacttttctgaatgggcagtatagtctag

SEQ ID NO: 1069639 - DNA, 33 bp, Homo sapien
ttctgtgttttacatcaaaattgaacaatgtac

SEQ ID NO: 1069640 - DNA, 33 bp, Homo sapien
ttctgtgttttacatcgaaattgaacaatgtac

SEQ ID NO: 1069641 - DNA, 33 bp, Homo sapien
ctctccactccctaaacttaccactcataattt

SEQ ID NO: 1069642 - DNA, 33 bp, Homo sapien
ctctccactccctaaatttaccactcataattt

SEQ ID NO: 1069643 - DNA, 33 bp, Homo sapien
atcagtcaaagaagcactagtttttgttcagta

SEQ ID NO: 1069644 - DNA, 33 bp, Homo sapien
atcagtcaaagaagcagtagtttttgttcagta

SEQ ID NO: 1069645 - DNA, 33 bp, Homo sapien
gctaagtttcctttggaaccaagaacaggattg

SEQ ID NO: 1069646 - DNA, 33 bp, Homo sapien
gctaagtttcctttgggaccaagaacaggattg

SEQ ID NO: 1069647 - DNA, 33 bp, Homo sapien
tgcccttgccattaaccattctctatctctgat

SEQ ID NO: 1069648 - DNA, 33 bp, Homo sapien
tgcccttgccattaactattctctatctctgat

SEQ ID NO: 1069649 - DNA, 33 bp, Homo sapien
caaggagggactatgccgcacaggtactgagaa

SEQ ID NO: 1069650 - DNA, 33 bp, Homo sapien
caaggagggactatgctgcacaggtactgagaa

SEQ ID NO: 1069651 - DNA, 33 bp, Homo sapien
ggactctgtgaaaaggaaaatatgttaagccag

SEQ ID NO: 1069652 - DNA, 33 bp, Homo sapien
ggactctgtgaaaaggcaaatatgttaagccag

SEQ ID NO: 1069653 - DNA, 33 bp, Homo sapien
tgctgcgaggcctttcacttgggagagtttttc

SEQ ID NO: 1069654 - DNA, 33 bp, Homo sapien
tgctgcgaggcctttcgcttgggagagtttttc

SEQ ID NO: 1069655 - DNA, 33 bp, Homo sapien
agccttctatagtaccaccatcttttacagcaa

SEQ ID NO: 1069656 - DNA, 33 bp, Homo sapien
agccttctatagtaccgccatcttttacagcaa

SEQ ID NO: 1069657 - DNA, 33 bp, Homo sapien
tttggactgatttgaacgctggaaacagtttat

SEQ ID NO: 1069658 - DNA, 33 bp, Homo sapien
tttggactgatttgaatgctggaaacagtttat

SEQ ID NO: 1069659 - DNA, 33 bp, Homo sapien
ggattcaggagagaaacgggctttaagtactag

SEQ ID NO: 1069660 - DNA, 33 bp, Homo sapien
ggattcaggagagaaatgggctttaagtactag

SEQ ID NO: 1069661 - DNA, 33 bp, Homo sapien
agggaaatgttggagaccgtctctataaaacta

SEQ ID NO: 1069662 - DNA, 33 bp, Homo sapien
agggaaatgttggagagcgtctctataaaacta

SEQ ID NO: 1069663 - DNA, 33 bp, Homo sapien
tttttaccatagccagaactcattgcccctata

SEQ ID NO: 1069664 - DNA, 33 bp, Homo sapien
tttttaccatagccaggactcattgcccctata

SEQ ID NO: 1069665 - DNA, 33 bp, Homo sapien
gaatctatccaacaaccagaatacttgggccca

SEQ ID NO: 1069666 - DNA, 33 bp, Homo sapien
gaatctatccaacaacgagaatacttgggccca

SEQ ID NO: 1069667 - DNA, 33 bp, Homo sapien
tgagagtcctcactcagatggtcttacaaaatg

SEQ ID NO: 1069668 - DNA, 33 bp, Homo sapien
tgagagtcctcactcatatggtcttacaaaatg

SEQ ID NO: 1069669 - DNA, 33 bp, Homo sapien
aacctgagagaccagacgaagccatatttaaag

SEQ ID NO: 1069670 - DNA, 33 bp, Homo sapien
aacctgagagaccagatgaagccatatttaaag

SEQ ID NO: 1069671 - DNA, 33 bp, Homo sapien
atcatggacccataccaaaacctgagagaccag

SEQ ID NO: 1069672 - DNA, 33 bp, Homo sapien
atcatggacccataccgaaacctgagagaccag

SEQ ID NO: 1069673 - DNA, 33 bp, Homo sapien
aatgggagtgttgaaacagcttaagtcatcagg

SEQ ID NO: 1069674 - DNA, 33 bp, Homo sapien
aatgggagtgttgaaatagcttaagtcatcagg

SEQ ID NO: 1069675 - DNA, 33 bp, Homo sapien
taaaggcataaaaagccatacgttcacttaggc

SEQ ID NO: 1069676 - DNA, 33 bp, Homo sapien
taaaggcataaaaagctatacgttcacttaggc

SEQ ID NO: 1069677 - DNA, 33 bp, Homo sapien
gagtccaaagagtgtaaaagatccagccactca

SEQ ID NO: 1069678 - DNA, 33 bp, Homo sapien
gagtccaaagagtgtataagatccagccactca

SEQ ID NO: 1069679 - DNA, 33 bp, Homo sapien
cagtgaaaatttaacacagcatgtttccaagtg

SEQ ID NO: 1069680 - DNA, 33 bp, Homo sapien
cagtgaaaatttaacagagcatgtttccaagtg

SEQ ID NO: 1069681 - DNA, 33 bp, Homo sapien
ttctgctaactgactaacttagttatagtatct

SEQ ID NO: 1069682 - DNA, 33 bp, Homo sapien
ttctgctaactgactagcttagttatagtatct

SEQ ID NO: 1069683 - DNA, 33 bp, Homo sapien
tagggaattgaggggccacaaaatggggaaaac

SEQ ID NO: 1069684 - DNA, 33 bp, Homo sapien
tagggaattgaggggcgacaaaatggggaaaac

SEQ ID NO: 1069685 - DNA, 33 bp, Homo sapien
tagccctagagggaaacaaggccaaattaccag

SEQ ID NO: 1069686 - DNA, 33 bp, Homo sapien
tagccctagagggaaagaaggccaaattaccag

SEQ ID NO: 1069687 - DNA, 33 bp, Homo sapien
tcttaccagttcgtgaacaaatcctctttgtcc

SEQ ID NO: 1069688 - DNA, 33 bp, Homo sapien
tcttaccagttcgtgagcaaatcctctttgtcc

SEQ ID NO: 1069689 - DNA, 33 bp, Homo sapien
tggattattgcaaaagcctcttaatgggtctcc

SEQ ID NO: 1069690 - DNA, 33 bp, Homo sapien
tggattattgcaaaaggctcttaatgggtctcc

SEQ ID NO: 1069691 - DNA, 33 bp, Homo sapien
taagttgagatttaaacggtgaatggaagttag

SEQ ID NO: 1069692 - DNA, 33 bp, Homo sapien
taagttgagatttaaatggtgaatggaagttag

SEQ ID NO: 1069693 - DNA, 33 bp, Homo sapien
gagaagagacaatagcaacagtaagtagagaca

SEQ ID NO: 1069694 - DNA, 33 bp, Homo sapien
gagaagagacaatagcgacagtaagtagagaca

SEQ ID NO: 1069695 - DNA, 33 bp, Homo sapien
ggaatgaaggagactacgggaaattagcataga

SEQ ID NO: 1069696 - DNA, 33 bp, Homo sapien
ggaatgaaggagactatgggaaattagcataga

SEQ ID NO: 1069697 - DNA, 33 bp, Homo sapien
acagaaaggacgtggaataggtggctacttaca

SEQ ID NO: 1069698 - DNA, 33 bp, Homo sapien
acagaaaggacgtggactaggtggctacttaca

SEQ ID NO: 1069699 - DNA, 33 bp, Homo sapien
cttgtcagagactttaggtgctataggagctca

SEQ ID NO: 1069700 - DNA, 33 bp, Homo sapien
cttgtcagagactttatgtgctataggagctca

SEQ ID NO: 1069701 - DNA, 33 bp, Homo sapien
aggatttaagctaaaaaaggatagtgggcttag

SEQ ID NO: 1069702 - DNA, 33 bp, Homo sapien
aggatttaagctaaaataggatagtgggcttag

SEQ ID NO: 1069703 - DNA, 33 bp, Homo sapien
ggtccagaaaagcctcactacaaaggcagtaac

SEQ ID NO: 1069704 - DNA, 33 bp, Homo sapien
ggtccagaaaagcctcgctacaaaggcagtaac

SEQ ID NO: 1069705 - DNA, 33 bp, Homo sapien
ccatatcagaatgaaacgatttgcttaaggtca

SEQ ID NO: 1069706 - DNA, 33 bp, Homo sapien
ccatatcagaatgaaaggatttgcttaaggtca

SEQ ID NO: 1069707 - DNA, 33 bp, Homo sapien
tcagagacagcactgggaagagtatgtcatctc

SEQ ID NO: 1069708 - DNA, 33 bp, Homo sapien
tcagagacagcactggtaagagtatgtcatctc

SEQ ID NO: 1069709 - DNA, 33 bp, Homo sapien
aattatgagaaaaggccgattaaaaccctatca

SEQ ID NO: 1069710 - DNA, 33 bp, Homo sapien
aattatgagaaaaggctgattaaaaccctatca

SEQ ID NO: 1069711 - DNA, 33 bp, Homo sapien
caatgccacatgaaagacagttattacacaaat

SEQ ID NO: 1069712 - DNA, 33 bp, Homo sapien
caatgccacatgaaagtcagttattacacaaat

SEQ ID NO: 1069713 - DNA, 33 bp, Homo sapien
ggccaatcttaggttccataacggtgatgttat

SEQ ID NO: 1069714 - DNA, 33 bp, Homo sapien
ggccaatcttaggttctataacggtgatgttat

SEQ ID NO: 1069715 - DNA, 33 bp, Homo sapien
ttatggaaacctgacacacatatgggaaactag

SEQ ID NO: 1069716 - DNA, 33 bp, Homo sapien
ttatggaaacctgacatacatatgggaaactag

SEQ ID NO: 1069717 - DNA, 33 bp, Homo sapien
atgaagagaaagcacacatgttagattttaata

SEQ ID NO: 1069718 - DNA, 33 bp, Homo sapien
atgaagagaaagcacatatgttagattttaata

SEQ ID NO: 1069719 - DNA, 33 bp, Homo sapien
aaacccagcaaattgaaaaggtgagattatttt

SEQ ID NO: 1069720 - DNA, 33 bp, Homo sapien
aaacccagcaaattgagaaggtgagattatttt

SEQ ID NO: 1069721 - DNA, 33 bp, Homo sapien
gctggacaaatttacacgcttaccaacagtgtg

SEQ ID NO: 1069722 - DNA, 33 bp, Homo sapien
gctggacaaatttacatgcttaccaacagtgtg

SEQ ID NO: 1069723 - DNA, 33 bp, Homo sapien
tggtcaggtagcctaacgtgtttttgttgttag

SEQ ID NO: 1069724 - DNA, 33 bp, Homo sapien
tggtcaggtagcctaatgtgtttttgttgttag

SEQ ID NO: 1069725 - DNA, 33 bp, Homo sapien
taaaaccagagagtaagggcaggacagttttac

SEQ ID NO: 1069726 - DNA, 33 bp, Homo sapien
taaaaccagagagtaatggcaggacagttttac

SEQ ID NO: 1069727 - DNA, 33 bp, Homo sapien
tcatgttacaaaccaacggctcacagtgttctg

SEQ ID NO: 1069728 - DNA, 33 bp, Homo sapien
tcatgttacaaaccaatggctcacagtgttctg

SEQ ID NO: 1069729 - DNA, 33 bp, Homo sapien
tatttccttgaatatcactcccttcacttcttg

SEQ ID NO: 1069730 - DNA, 33 bp, Homo sapien
tatttccttgaatatctctcccttcacttcttg

SEQ ID NO: 1069731 - DNA, 33 bp, Homo sapien
tctaagaacacggaaacttcaaacacattattc

SEQ ID NO: 1069732 - DNA, 33 bp, Homo sapien
tctaagaacacggaaagttcaaacacattattc

SEQ ID NO: 1069733 - DNA, 33 bp, Homo sapien
tggttggaaaaagttcaagtgcttagaactaga

SEQ ID NO: 1069734 - DNA, 33 bp, Homo sapien
tggttggaaaaagttcgagtgcttagaactaga

SEQ ID NO: 1069735 - DNA, 33 bp, Homo sapien
taaaaaaatacctaagactgggcaattcataaa

SEQ ID NO: 1069736 - DNA, 33 bp, Homo sapien
taaaaaaatacctaagtctgggcaattcataaa

SEQ ID NO: 1069737 - DNA, 33 bp, Homo sapien
ttaacaaagatttatggagcctctgtaccctgc

SEQ ID NO: 1069738 - DNA, 33 bp, Homo sapien
ttaacaaagatttatgtagcctctgtaccctgc

SEQ ID NO: 1069739 - DNA, 33 bp, Homo sapien
agctggattgcaaagacgattggtcaccactcc

SEQ ID NO: 1069740 - DNA, 33 bp, Homo sapien
agctggattgcaaagatgattggtcaccactcc

SEQ ID NO: 1069741 - DNA, 33 bp, Homo sapien
ttgccatcattcttgccaactcaaactatacga

SEQ ID NO: 1069742 - DNA, 33 bp, Homo sapien
ttgccatcattcttgctaactcaaactatacga

SEQ ID NO: 1069743 - DNA, 33 bp, Homo sapien
gaggtgacaggacatcagagaaaaatggcaatg

SEQ ID NO: 1069744 - DNA, 33 bp, Homo sapien
gaggtgacaggacatcggagaaaaatggcaatg

SEQ ID NO: 1069745 - DNA, 33 bp, Homo sapien
ttcacactggccatcactgacatactcattgtc

SEQ ID NO: 1069746 - DNA, 33 bp, Homo sapien
ttcacactggccatcattgacatactcattgtc

SEQ ID NO: 1069747 - DNA, 33 bp, Homo sapien
tgagggactcccctgaagtaatcaattaaaagc

SEQ ID NO: 1069748 - DNA, 33 bp, Homo sapien
tgagggactcccctgaggtaatcaattaaaagc

SEQ ID NO: 1069749 - DNA, 33 bp, Homo sapien
cttcatgacatacacactagatttgaaaggata

SEQ ID NO: 1069750 - DNA, 33 bp, Homo sapien
cttcatgacatacacattagatttgaaaggata

SEQ ID NO: 1069751 - DNA, 33 bp, Homo sapien
ggtggaacaggccacaatggcatagacaagacc

SEQ ID NO: 1069752 - DNA, 33 bp, Homo sapien
ggtggaacaggccacagtggcatagacaagacc

SEQ ID NO: 1069753 - DNA, 33 bp, Homo sapien
tttgacagaggagttacgacaaattcattcagg

SEQ ID NO: 1069754 - DNA, 33 bp, Homo sapien
tttgacagaggagttatgacaaattcattcagg

SEQ ID NO: 1069755 - DNA, 33 bp, Homo sapien
gctttgtttcccctcacgttccagtaggattgc

SEQ ID NO: 1069756 - DNA, 33 bp, Homo sapien
gctttgtttcccctcatgttccagtaggattgc

SEQ ID NO: 1069757 - DNA, 33 bp, Homo sapien
acaaaagcactaatccaaaaactttaggaatgg

SEQ ID NO: 1069758 - DNA, 33 bp, Homo sapien
acaaaagcactaatccgaaaactttaggaatgg

SEQ ID NO: 1069759 - DNA, 33 bp, Homo sapien
atagatcagttgagaccagttgaggaagagctt

SEQ ID NO: 1069760 - DNA, 33 bp, Homo sapien
atagatcagttgagactagttgaggaagagctt

SEQ ID NO: 1069761 - DNA, 33 bp, Homo sapien
gcaaagagaatacaccaccggagagataaaagg

SEQ ID NO: 1069762 - DNA, 33 bp, Homo sapien
gcaaagagaatacaccgccggagagataaaagg

SEQ ID NO: 1069763 - DNA, 33 bp, Homo sapien
tgttttgggtacagaactgcaaatacagtgaaa

SEQ ID NO: 1069764 - DNA, 33 bp, Homo sapien
tgttttgggtacagaattgcaaatacagtgaaa

SEQ ID NO: 1069765 - DNA, 33 bp, Homo sapien
gaccttaaaaaatgccaaactcaacaaatgcat

SEQ ID NO: 1069766 - DNA, 33 bp, Homo sapien
gaccttaaaaaatgccgaactcaacaaatgcat

SEQ ID NO: 1069767 - DNA, 33 bp, Homo sapien
gtaatttttgaactaacggcataactgaacaac

SEQ ID NO: 1069768 - DNA, 33 bp, Homo sapien
gtaatttttgaactaatggcataactgaacaac

SEQ ID NO: 1069769 - DNA, 33 bp, Homo sapien
tataaaactagctaagcaattaaagctagtacc

SEQ ID NO: 1069770 - DNA, 33 bp, Homo sapien
tataaaactagctaaggaattaaagctagtacc

SEQ ID NO: 1069771 - DNA, 33 bp, Homo sapien
aaagcaaatcaacgaacgagaaattaatagtac

SEQ ID NO: 1069772 - DNA, 33 bp, Homo sapien
aaagcaaatcaacgaatgagaaattaatagtac

SEQ ID NO: 1069773 - DNA, 33 bp, Homo sapien
gttattcctctccaaaaattaagcccagtctag

SEQ ID NO: 1069774 - DNA, 33 bp, Homo sapien
gttattcctctccaaagattaagcccagtctag

SEQ ID NO: 1069775 - DNA, 33 bp, Homo sapien
tagggagcatctgtcacgtatcaggaactgtgc

SEQ ID NO: 1069776 - DNA, 33 bp, Homo sapien
tagggagcatctgtcatgtatcaggaactgtgc

SEQ ID NO: 1069777 - DNA, 33 bp, Homo sapien
gacaaacctgttctgccctcagtcttccattaa

SEQ ID NO: 1069778 - DNA, 33 bp, Homo sapien
gacaaacctgttctgctctcagtcttccattaa

SEQ ID NO: 1069779 - DNA, 33 bp, Homo sapien
ttgtttgatgggtatacagtttcagctttgcaa

SEQ ID NO: 1069780 - DNA, 33 bp, Homo sapien
ttgtttgatgggtatagagtttcagctttgcaa

SEQ ID NO: 1069781 - DNA, 33 bp, Homo sapien
caaaagcagatgtgggacaccagctgttctccc

SEQ ID NO: 1069782 - DNA, 33 bp, Homo sapien
caaaagcagatgtgggccaccagctgttctccc

SEQ ID NO: 1069783 - DNA, 33 bp, Homo sapien
cccagccagaactcaagtattcttaaacatgag

SEQ ID NO: 1069784 - DNA, 33 bp, Homo sapien
cccagccagaactcaattattcttaaacatgag

SEQ ID NO: 1069785 - DNA, 33 bp, Homo sapien
aatctctaagtgtttcaagtctagtgctggctt

SEQ ID NO: 1069786 - DNA, 33 bp, Homo sapien
aatctctaagtgtttctagtctagtgctggctt

SEQ ID NO: 1069787 - DNA, 33 bp, Homo sapien
agctgacaagcccagtaaaagagtttccatcca

SEQ ID NO: 1069788 - DNA, 33 bp, Homo sapien
agctgacaagcccagtgaaagagtttccatcca

SEQ ID NO: 1069789 - DNA, 33 bp, Homo sapien
cagagtttagagaatcaatccaagaaacacttg

SEQ ID NO: 1069790 - DNA, 33 bp, Homo sapien
cagagtttagagaatcgatccaagaaacacttg

SEQ ID NO: 1069791 - DNA, 33 bp, Homo sapien
tccagttgactacgtaggttccatagaccctgg

SEQ ID NO: 1069792 - DNA, 33 bp, Homo sapien
tccagttgactacgtatgttccatagaccctgg

SEQ ID NO: 1069793 - DNA, 33 bp, Homo sapien
gagaatgaataaatgaaacaatggtcaccttca

SEQ ID NO: 1069794 - DNA, 33 bp, Homo sapien
gagaatgaataaatgagacaatggtcaccttca

SEQ ID NO: 1069795 - DNA, 33 bp, Homo sapien
ggactgcaggcttcacaagagtcggcctgcatg

SEQ ID NO: 1069796 - DNA, 33 bp, Homo sapien
ggactgcaggcttcacgagagtcggcctgcatg

SEQ ID NO: 1069797 - DNA, 33 bp, Homo sapien
cttgaatatatcagacaatctgagaaggtatgt

SEQ ID NO: 1069798 - DNA, 33 bp, Homo sapien
cttgaatatatcagacgatctgagaaggtatgt

SEQ ID NO: 1069799 - DNA, 33 bp, Homo sapien
gaccaaatgtggagcaactctttggcctatcaa

SEQ ID NO: 1069800 - DNA, 33 bp, Homo sapien
gaccaaatgtggagcagctctttggcctatcaa

SEQ ID NO: 1069801 - DNA, 33 bp, Homo sapien
cataatcatgcgcctacggactcacccactacc

SEQ ID NO: 1069802 - DNA, 33 bp, Homo sapien
cataatcatgcgcctatggactcacccactacc

SEQ ID NO: 1069803 - DNA, 33 bp, Homo sapien
tcagattttggtacccacaagcagtcttgggcc

SEQ ID NO: 1069804 - DNA, 33 bp, Homo sapien
tcagattttggtacccgcaagcagtcttgggcc

SEQ ID NO: 1069805 - DNA, 33 bp, Homo sapien
atggcagagtctacacacttacatccctacttc

SEQ ID NO: 1069806 - DNA, 33 bp, Homo sapien
atggcagagtctacacgcttacatccctacttc

SEQ ID NO: 1069807 - DNA, 33 bp, Homo sapien
ctgatgagttaaagcccgcaatgaggatggcaa

SEQ ID NO: 1069808 - DNA, 33 bp, Homo sapien
ctgatgagttaaagcctgcaatgaggatggcaa

SEQ ID NO: 1069809 - DNA, 33 bp, Homo sapien
gacgggaagggtattacggatgagtcatgcatg

SEQ ID NO: 1069810 - DNA, 33 bp, Homo sapien
gacgggaagggtattatggatgagtcatgcatg

SEQ ID NO: 1069811 - DNA, 33 bp, Homo sapien
ataaaggaaaggaagcgctccaggagcagatgg

SEQ ID NO: 1069812 - DNA, 33 bp, Homo sapien
ataaaggaaaggaagctctccaggagcagatgg

SEQ ID NO: 1069813 - DNA, 33 bp, Homo sapien
ggtcagttctttctgccaaataagagtccatgc

SEQ ID NO: 1069814 - DNA, 33 bp, Homo sapien
ggtcagttctttctgcgaaataagagtccatgc

SEQ ID NO: 1069815 - DNA, 33 bp, Homo sapien
cccaagatcacacttacagataggtccatctgg

SEQ ID NO: 1069816 - DNA, 33 bp, Homo sapien
cccaagatcacacttatagataggtccatctgg

SEQ ID NO: 1069817 - DNA, 33 bp, Homo sapien
caatgccatctctgcaactctactgccaagatt

SEQ ID NO: 1069818 - DNA, 33 bp, Homo sapien
caatgccatctctgcacctctactgccaagatt

SEQ ID NO: 1069819 - DNA, 33 bp, Homo sapien
gaaatagcagttgttagagcaaagatcagctga

SEQ ID NO: 1069820 - DNA, 33 bp, Homo sapien
gaaatagcagttgttatagcaaagatcagctga

SEQ ID NO: 1069821 - DNA, 33 bp, Homo sapien
taaaccctgaaaagacccaattagattagaaga

SEQ ID NO: 1069822 - DNA, 33 bp, Homo sapien
taaaccctgaaaagactcaattagattagaaga

SEQ ID NO: 1069823 - DNA, 33 bp, Homo sapien
cctccatcctttgaaacgcacgaagctggccag

SEQ ID NO: 1069824 - DNA, 33 bp, Homo sapien
cctccatcctttgaaatgcacgaagctggccag

SEQ ID NO: 1069825 - DNA, 33 bp, Homo sapien
cagatttggagactgacaatgttatcaagacag

SEQ ID NO: 1069826 - DNA, 33 bp, Homo sapien
cagatttggagactgagaatgttatcaagacag

SEQ ID NO: 1069827 - DNA, 33 bp, Homo sapien
gaggctggagagtatacggcctgatctagcaga

SEQ ID NO: 1069828 - DNA, 33 bp, Homo sapien
gaggctggagagtatatggcctgatctagcaga

SEQ ID NO: 1069829 - DNA, 33 bp, Homo sapien
ttcctagttttccacggccagctgaaccctctc

SEQ ID NO: 1069830 - DNA, 33 bp, Homo sapien
ttcctagttttccacgtccagctgaaccctctc

SEQ ID NO: 1069831 - DNA, 33 bp, Homo sapien
gagcattgccacgaaacggtggcaaatctcacg

SEQ ID NO: 1069832 - DNA, 33 bp, Homo sapien
gagcattgccacgaaatggtggcaaatctcacg

SEQ ID NO: 1069833 - DNA, 33 bp, Homo sapien
cagccgtgcagaatagactaacctggccaggcg

SEQ ID NO: 1069834 - DNA, 33 bp, Homo sapien
cagccgtgcagaataggctaacctggccaggcg

SEQ ID NO: 1069835 - DNA, 33 bp, Homo sapien
aggtgttcaggaaacagcgagggctggccagct

SEQ ID NO: 1069836 - DNA, 33 bp, Homo sapien
aggtgttcaggaaacatcgagggctggccagct

SEQ ID NO: 1069837 - DNA, 33 bp, Homo sapien
cacacaccagattggcgctggcttttattattt

SEQ ID NO: 1069838 - DNA, 33 bp, Homo sapien
cacacaccagattggctctggcttttattattt

SEQ ID NO: 1069839 - DNA, 33 bp, Homo sapien
tagtttaatataaagacgtatccagaagtatag

SEQ ID NO: 1069840 - DNA, 33 bp, Homo sapien
tagtttaatataaagatgtatccagaagtatag

SEQ ID NO: 1069841 - DNA, 33 bp, Homo sapien
ccttcaaggattcttccagtccggtctctgccc

SEQ ID NO: 1069842 - DNA, 33 bp, Homo sapien
ccttcaaggattcttctagtccggtctctgccc

SEQ ID NO: 1069843 - DNA, 33 bp, Homo sapien
acttgaaatttgctaaaagagtaatcttaagtg

SEQ ID NO: 1069844 - DNA, 33 bp, Homo sapien
acttgaaatttgctaagagagtaatcttaagtg

SEQ ID NO: 1069845 - DNA, 33 bp, Homo sapien
gcattactaaattcacagggtagtcatgatctc

SEQ ID NO: 1069846 - DNA, 33 bp, Homo sapien
gcattactaaattcacggggtagtcatgatctc

SEQ ID NO: 1069847 - DNA, 33 bp, Homo sapien
gagagctatgccttacagattggcagcttggat

SEQ ID NO: 1069848 - DNA, 33 bp, Homo sapien
gagagctatgccttacggattggcagcttggat

SEQ ID NO: 1069849 - DNA, 33 bp, Homo sapien
gggtggcagaaggaaaaaatcaatctggttggt

SEQ ID NO: 1069850 - DNA, 33 bp, Homo sapien
gggtggcagaaggaaagaatcaatctggttggt

SEQ ID NO: 1069851 - DNA, 33 bp, Homo sapien
cacattccctctcggactaagtggctatgtgag

SEQ ID NO: 1069852 - DNA, 33 bp, Homo sapien
cacattccctctcggattaagtggctatgtgag

SEQ ID NO: 1069853 - DNA, 33 bp, Homo sapien
ggtctcttgtcattataacatccaaattaaaac

SEQ ID NO: 1069854 - DNA, 33 bp, Homo sapien
ggtctcttgtcattattacatccaaattaaaac

SEQ ID NO: 1069855 - DNA, 33 bp, Homo sapien
atactcgaagagtacaataaggaaaacaagggg

SEQ ID NO: 1069856 - DNA, 33 bp, Homo sapien
atactcgaagagtacagtaaggaaaacaagggg

SEQ ID NO: 1069857 - DNA, 33 bp, Homo sapien
attactacaaatgcaaaacccattctagctgcc

SEQ ID NO: 1069858 - DNA, 33 bp, Homo sapien
attactacaaatgcaagacccattctagctgcc

SEQ ID NO: 1069859 - DNA, 33 bp, Homo sapien
gtgaaagaagttacctcacagcatttctagcac

SEQ ID NO: 1069860 - DNA, 33 bp, Homo sapien
gtgaaagaagttaccttacagcatttctagcac

SEQ ID NO: 1069861 - DNA, 33 bp, Homo sapien
agtggttctgcagaatcagctctgaattccaga

SEQ ID NO: 1069862 - DNA, 33 bp, Homo sapien
agtggttctgcagaatgagctctgaattccaga

SEQ ID NO: 1069863 - DNA, 33 bp, Homo sapien
tgttgattgatgttcacaacggttccaaggctt

SEQ ID NO: 1069864 - DNA, 33 bp, Homo sapien
tgttgattgatgttcagaacggttccaaggctt

SEQ ID NO: 1069865 - DNA, 33 bp, Homo sapien
caccacatctcatttccctggtctggggctggc

SEQ ID NO: 1069866 - DNA, 33 bp, Homo sapien
caccacatctcatttctctggtctggggctggc

SEQ ID NO: 1069867 - DNA, 33 bp, Homo sapien
agaggggttctaaccacaatacaaacactgcag

SEQ ID NO: 1069868 - DNA, 33 bp, Homo sapien
agaggggttctaaccataatacaaacactgcag

SEQ ID NO: 1069869 - DNA, 33 bp, Homo sapien
aacaaatatatctgcccggacttgcagtgcctt

SEQ ID NO: 1069870 - DNA, 33 bp, Homo sapien
aacaaatatatctgcctggacttgcagtgcctt

SEQ ID NO: 1069871 - DNA, 33 bp, Homo sapien
gtcacagccatcgatgacaatgtgtgtcctgga

SEQ ID NO: 1069872 - DNA, 33 bp, Homo sapien
gtcacagccatcgatgtcaatgtgtgtcctgga

SEQ ID NO: 1069873 - DNA, 33 bp, Homo sapien
acagtggctagctcaacgacactgctgttttgt

SEQ ID NO: 1069874 - DNA, 33 bp, Homo sapien
acagtggctagctcaatgacactgctgttttgt

SEQ ID NO: 1069875 - DNA, 33 bp, Homo sapien
acttgtcttactaacacggaaaagccaacttac

SEQ ID NO: 1069876 - DNA, 33 bp, Homo sapien
acttgtcttactaacatggaaaagccaacttac

SEQ ID NO: 1069877 - DNA, 33 bp, Homo sapien
tgtgaatcgagtagagaaccagttcctaacctt

SEQ ID NO: 1069878 - DNA, 33 bp, Homo sapien
tgtgaatcgagtagaggaccagttcctaacctt

SEQ ID NO: 1069879 - DNA, 33 bp, Homo sapien
tactcgattcacatgaccaggcaacttttggaa

SEQ ID NO: 1069880 - DNA, 33 bp, Homo sapien
tactcgattcacatgagcaggcaacttttggaa

SEQ ID NO: 1069881 - DNA, 33 bp, Homo sapien
ctctgtccggcactacaccagatattatttcaa

SEQ ID NO: 1069882 - DNA, 33 bp, Homo sapien
ctctgtccggcactacgccagatattatttcaa

SEQ ID NO: 1069883 - DNA, 33 bp, Homo sapien
atcaatccttttcctccactgtttgaattttac

SEQ ID NO: 1069884 - DNA, 33 bp, Homo sapien
atcaatccttttcctctactgtttgaattttac

SEQ ID NO: 1069885 - DNA, 33 bp, Homo sapien
catttcactctacaggacaatattcagtcccct

SEQ ID NO: 1069886 - DNA, 33 bp, Homo sapien
catttcactctacagggcaatattcagtcccct

SEQ ID NO: 1069887 - DNA, 33 bp, Homo sapien
ccttactttcatttgaacctcattcacaggggc

SEQ ID NO: 1069888 - DNA, 33 bp, Homo sapien
ccttactttcatttgatcctcattcacaggggc

SEQ ID NO: 1069889 - DNA, 33 bp, Homo sapien
ccttgtgtagagtagaccataggtgctcaaatt

SEQ ID NO: 1069890 - DNA, 33 bp, Homo sapien
ccttgtgtagagtagatcataggtgctcaaatt

SEQ ID NO: 1069891 - DNA, 33 bp, Homo sapien
tgaaatcggaatcccaatgagacatctgtactc

SEQ ID NO: 1069892 - DNA, 33 bp, Homo sapien
tgaaatcggaatcccagtgagacatctgtactc

SEQ ID NO: 1069893 - DNA, 33 bp, Homo sapien
ccttatgtaggattctcaattcattcgagaata

SEQ ID NO: 1069894 - DNA, 33 bp, Homo sapien
ccttatgtaggattctgaattcattcgagaata

SEQ ID NO: 1069895 - DNA, 33 bp, Homo sapien
tttcaagatatgctaccgagcaaaaaattttaa

SEQ ID NO: 1069896 - DNA, 33 bp, Homo sapien
tttcaagatatgctactgagcaaaaaattttaa

SEQ ID NO: 1069897 - DNA, 33 bp, Homo sapien
ccaactctgagttccaatagctcttcttgacat

SEQ ID NO: 1069898 - DNA, 33 bp, Homo sapien
ccaactctgagttccactagctcttcttgacat

SEQ ID NO: 1069899 - DNA, 33 bp, Homo sapien
ttctaccttctaccaccatgagattaatttatt

SEQ ID NO: 1069900 - DNA, 33 bp, Homo sapien
ttctaccttctaccacgatgagattaatttatt

SEQ ID NO: 1069901 - DNA, 33 bp, Homo sapien
agggtacagaggaggaagaactctcatacactg

SEQ ID NO: 1069902 - DNA, 33 bp, Homo sapien
agggtacagaggaggaggaactctcatacactg

SEQ ID NO: 1069903 - DNA, 33 bp, Homo sapien
ttgtgtaatagtagacaaaatggtgcccaatcc

SEQ ID NO: 1069904 - DNA, 33 bp, Homo sapien
ttgtgtaatagtagaccaaatggtgcccaatcc

SEQ ID NO: 1069905 - DNA, 33 bp, Homo sapien
catggatatttagctcaagaaacatgagatgta

SEQ ID NO: 1069906 - DNA, 33 bp, Homo sapien
catggatatttagctcgagaaacatgagatgta

SEQ ID NO: 1069907 - DNA, 33 bp, Homo sapien
atggagcaactatgtccgaaaattttaagagcc

SEQ ID NO: 1069908 - DNA, 33 bp, Homo sapien
atggagcaactatgtctgaaaattttaagagcc

SEQ ID NO: 1069909 - DNA, 33 bp, Homo sapien
tgtgtagcatcctgtagctctgctcttggtggc

SEQ ID NO: 1069910 - DNA, 33 bp, Homo sapien
tgtgtagcatcctgtatctctgctcttggtggc

SEQ ID NO: 1069911 - DNA, 33 bp, Homo sapien
cttattttcttattcccaggcaacctacaatta

SEQ ID NO: 1069912 - DNA, 33 bp, Homo sapien
cttattttcttattcctaggcaacctacaatta

SEQ ID NO: 1069913 - DNA, 33 bp, Homo sapien
gactccctacctcacactgagtaaattccaaag

SEQ ID NO: 1069914 - DNA, 33 bp, Homo sapien
gactccctacctcacattgagtaaattccaaag

SEQ ID NO: 1069915 - DNA, 33 bp, Homo sapien
tcttcactgaagcatcacctgtcttgcttagat

SEQ ID NO: 1069916 - DNA, 33 bp, Homo sapien
tcttcactgaagcatcgcctgtcttgcttagat

SEQ ID NO: 1069917 - DNA, 33 bp, Homo sapien
tcacctttgatatgtcaagtggctgtacaaggt

SEQ ID NO: 1069918 - DNA, 33 bp, Homo sapien
tcacctttgatatgtcgagtggctgtacaaggt

SEQ ID NO: 1069919 - DNA, 33 bp, Homo sapien
agttaaatagtagtcacactgtggtcaccttgc

SEQ ID NO: 1069920 - DNA, 33 bp, Homo sapien
agttaaatagtagtcagactgtggtcaccttgc

SEQ ID NO: 1069921 - DNA, 33 bp, Homo sapien
cctctaacgtattgagacatgtacctagtaagt

SEQ ID NO: 1069922 - DNA, 33 bp, Homo sapien
cctctaacgtattgaggcatgtacctagtaagt

SEQ ID NO: 1069923 - DNA, 33 bp, Homo sapien
gaactgcccggacaaaagtgaaatacttatcgt

SEQ ID NO: 1069924 - DNA, 33 bp, Homo sapien
gaactgcccggacaaaggtgaaatacttatcgt

SEQ ID NO: 1069925 - DNA, 33 bp, Homo sapien
aactggacacagcataaaagcactgagaagagc

SEQ ID NO: 1069926 - DNA, 33 bp, Homo sapien
aactggacacagcatagaagcactgagaagagc

SEQ ID NO: 1069927 - DNA, 33 bp, Homo sapien
atggacattggtcgaagtgttgaaaaggtgtgt

SEQ ID NO: 1069928 - DNA, 33 bp, Homo sapien
atggacattggtcgaattgttgaaaaggtgtgt

SEQ ID NO: 1069929 - DNA, 33 bp, Homo sapien
aaattgtccagtagaaacaattcactcaaaaga

SEQ ID NO: 1069930 - DNA, 33 bp, Homo sapien
aaattgtccagtagaagcaattcactcaaaaga

SEQ ID NO: 1069931 - DNA, 33 bp, Homo sapien
aggccaatattttatcaaaaatcatggcattaa

SEQ ID NO: 1069932 - DNA, 33 bp, Homo sapien
aggccaatattttatcgaaaatcatggcattaa

SEQ ID NO: 1069933 - DNA, 33 bp, Homo sapien
tagaagaagttatctcagaaataattaacaaat

SEQ ID NO: 1069934 - DNA, 33 bp, Homo sapien
tagaagaagttatctctgaaataattaacaaat

SEQ ID NO: 1069935 - DNA, 33 bp, Homo sapien
catgagcctttcttcaaaacacaatgggagttg

SEQ ID NO: 1069936 - DNA, 33 bp, Homo sapien
catgagcctttcttcagaacacaatgggagttg

SEQ ID NO: 1069937 - DNA, 33 bp, Homo sapien
acttctgactaaccccaagagtccaagaacgcc

SEQ ID NO: 1069938 - DNA, 33 bp, Homo sapien
acttctgactaaccccgagagtccaagaacgcc

SEQ ID NO: 1069939 - DNA, 33 bp, Homo sapien
ctatatataagcaaacgaagtctcagggtggta

SEQ ID NO: 1069940 - DNA, 33 bp, Homo sapien
ctatatataagcaaactaagtctcagggtggta

SEQ ID NO: 1069941 - DNA, 33 bp, Homo sapien
atattttagttaaagacgtggtgattcacccag

SEQ ID NO: 1069942 - DNA, 33 bp, Homo sapien
atattttagttaaagatgtggtgattcacccag

SEQ ID NO: 1069943 - DNA, 33 bp, Homo sapien
aattctaaaactttaaagagcagatgagatgta

SEQ ID NO: 1069944 - DNA, 33 bp, Homo sapien
aattctaaaactttaaggagcagatgagatgta

SEQ ID NO: 1069945 - DNA, 33 bp, Homo sapien
cttcaatttgtctacacagatcaagatttcttc

SEQ ID NO: 1069946 - DNA, 33 bp, Homo sapien
cttcaatttgtctacagagatcaagatttcttc

SEQ ID NO: 1069947 - DNA, 33 bp, Homo sapien
taaggcagcagtagtcagaaatttaaagttcag

SEQ ID NO: 1069948 - DNA, 33 bp, Homo sapien
taaggcagcagtagtcggaaatttaaagttcag

SEQ ID NO: 1069949 - DNA, 33 bp, Homo sapien
acttactaaatttgcaaccatgggcaactttct

SEQ ID NO: 1069950 - DNA, 33 bp, Homo sapien
acttactaaatttgcatccatgggcaactttct

SEQ ID NO: 1069951 - DNA, 33 bp, Homo sapien
ttttatataaagtgccacataaacatcctcatt

SEQ ID NO: 1069952 - DNA, 33 bp, Homo sapien
ttttatataaagtgccgcataaacatcctcatt

SEQ ID NO: 1069953 - DNA, 33 bp, Homo sapien
ctcatgtgacacaaagcacctttaattgagcat

SEQ ID NO: 1069954 - DNA, 33 bp, Homo sapien
ctcatgtgacacaaagtacctttaattgagcat

SEQ ID NO: 1069955 - DNA, 33 bp, Homo sapien
ggatactgtgcttttacagggacagagattata

SEQ ID NO: 1069956 - DNA, 33 bp, Homo sapien
ggatactgtgcttttatagggacagagattata

SEQ ID NO: 1069957 - DNA, 33 bp, Homo sapien
gttattgtaggataaccgataatatactgtcta

SEQ ID NO: 1069958 - DNA, 33 bp, Homo sapien
gttattgtaggataactgataatatactgtcta

SEQ ID NO: 1069959 - DNA, 33 bp, Homo sapien
ttcttgtacactaaaacattgtgtcttgtgtgg

SEQ ID NO: 1069960 - DNA, 33 bp, Homo sapien
ttcttgtacactaaaatattgtgtcttgtgtgg

SEQ ID NO: 1069961 - DNA, 33 bp, Homo sapien
tacttttatgaatatgaatgagttctgtattgt

SEQ ID NO: 1069962 - DNA, 33 bp, Homo sapien
tacttttatgaatatgcatgagttctgtattgt

SEQ ID NO: 1069963 - DNA, 33 bp, Homo sapien
gctgaaaatctttccaatatgtttcagtccact

SEQ ID NO: 1069964 - DNA, 33 bp, Homo sapien
gctgaaaatctttccagtatgtttcagtccact

SEQ ID NO: 1069965 - DNA, 33 bp, Homo sapien
agttttgtttgcaggaatactagtgaaatttct

SEQ ID NO: 1069966 - DNA, 33 bp, Homo sapien
agttttgtttgcaggattactagtgaaatttct

SEQ ID NO: 1069967 - DNA, 33 bp, Homo sapien
tgtcacatggaatattcaaatacaggctagatt

SEQ ID NO: 1069968 - DNA, 33 bp, Homo sapien
tgtcacatggaatatttaaatacaggctagatt

SEQ ID NO: 1069969 - DNA, 33 bp, Homo sapien
agttgtgtacacataaaagcaagcaaaaattat

SEQ ID NO: 1069970 - DNA, 33 bp, Homo sapien
agttgtgtacacataagagcaagcaaaaattat

SEQ ID NO: 1069971 - DNA, 33 bp, Homo sapien
ttatttctctaatttaagaatcctggactgtta

SEQ ID NO: 1069972 - DNA, 33 bp, Homo sapien
ttatttctctaatttaggaatcctggactgtta

SEQ ID NO: 1069973 - DNA, 33 bp, Homo sapien
aggaggattgaagataacaatgaagatattgtc

SEQ ID NO: 1069974 - DNA, 33 bp, Homo sapien
aggaggattgaagatagcaatgaagatattgtc

SEQ ID NO: 1069975 - DNA, 33 bp, Homo sapien
ggtggcaaatgtcctacgtagttggaagctctg

SEQ ID NO: 1069976 - DNA, 33 bp, Homo sapien
ggtggcaaatgtcctatgtagttggaagctctg

SEQ ID NO: 1069977 - DNA, 33 bp, Homo sapien
aacataatggtccataataatgaagaagattct

SEQ ID NO: 1069978 - DNA, 33 bp, Homo sapien
aacataatggtccatagtaatgaagaagattct

SEQ ID NO: 1069979 - DNA, 33 bp, Homo sapien
ctgtccccctttcccacgctttcagtggttcac

SEQ ID NO: 1069980 - DNA, 33 bp, Homo sapien
ctgtccccctttcccatgctttcagtggttcac

SEQ ID NO: 1069981 - DNA, 33 bp, Homo sapien
tgtcctagtgcacttacagtctaataaggaaga

SEQ ID NO: 1069982 - DNA, 33 bp, Homo sapien
tgtcctagtgcacttagagtctaataaggaaga

SEQ ID NO: 1069983 - DNA, 33 bp, Homo sapien
agtggtagaattagaaagttcactatgtttgac

SEQ ID NO: 1069984 - DNA, 33 bp, Homo sapien
agtggtagaattagaatgttcactatgtttgac

SEQ ID NO: 1069985 - DNA, 33 bp, Homo sapien
tttcactactctttccaagatctttttaccaac

SEQ ID NO: 1069986 - DNA, 33 bp, Homo sapien
tttcactactctttccgagatctttttaccaac

SEQ ID NO: 1069987 - DNA, 33 bp, Homo sapien
gaatttctagactggacgatcttgtggctgcct

SEQ ID NO: 1069988 - DNA, 33 bp, Homo sapien
gaatttctagactggatgatcttgtggctgcct

SEQ ID NO: 1069989 - DNA, 33 bp, Homo sapien
gagattaacttgctgacgtaattaaactgacat

SEQ ID NO: 1069990 - DNA, 33 bp, Homo sapien
gagattaacttgctgatgtaattaaactgacat

SEQ ID NO: 1069991 - DNA, 33 bp, Homo sapien
ctatatgtccactttacctaggctatagtctcc

SEQ ID NO: 1069992 - DNA, 33 bp, Homo sapien
ctatatgtccactttatctaggctatagtctcc

SEQ ID NO: 1069993 - DNA, 33 bp, Homo sapien
aggcagtgaagagagaaacattcaaaatctgaa

SEQ ID NO: 1069994 - DNA, 33 bp, Homo sapien
aggcagtgaagagagagacattcaaaatctgaa

SEQ ID NO: 1069995 - DNA, 33 bp, Homo sapien
atccataggttggagaaaatatttgcattacct

SEQ ID NO: 1069996 - DNA, 33 bp, Homo sapien
atccataggttggagacaatatttgcattacct

SEQ ID NO: 1069997 - DNA, 33 bp, Homo sapien
gcataaaatacatatcaaatggaagaacatttt

SEQ ID NO: 1069998 - DNA, 33 bp, Homo sapien
gcataaaatacatatccaatggaagaacatttt

SEQ ID NO: 1069999 - DNA, 33 bp, Homo sapien
ccatagccatcagtcaagtaaacaataatgttg

SEQ ID NO: 1070000 - DNA, 33 bp, Homo sapien
ccatagccatcagtcaggtaaacaataatgttg

SEQ ID NO: 1070001 - DNA, 33 bp, Homo sapien
atgaatgaaaacagaaagtttgacatttgtttt

SEQ ID NO: 1070002 - DNA, 33 bp, Homo sapien
atgaatgaaaacagaaggtttgacatttgtttt

SEQ ID NO: 1070003 - DNA, 33 bp, Homo sapien
ttccagggaagctcaaaagaaaaagatgttctt

SEQ ID NO: 1070004 - DNA, 33 bp, Homo sapien
ttccagggaagctcaacagaaaaagatgttctt

SEQ ID NO: 1070005 - DNA, 33 bp, Homo sapien
aatttaaaaagaagaaagtatgtctccaaattg

SEQ ID NO: 1070006 - DNA, 33 bp, Homo sapien
aatttaaaaagaagaacgtatgtctccaaattg

SEQ ID NO: 1070007 - DNA, 33 bp, Homo sapien
acgctttctggtgaaactcaagctgacttgttt

SEQ ID NO: 1070008 - DNA, 33 bp, Homo sapien
acgctttctggtgaaattcaagctgacttgttt

SEQ ID NO: 1070009 - DNA, 33 bp, Homo sapien
tagattattaagaagaagatttctgagccctta

SEQ ID NO: 1070010 - DNA, 33 bp, Homo sapien
tagattattaagaagatgatttctgagccctta

SEQ ID NO: 1070011 - DNA, 33 bp, Homo sapien
atactctggtcagtgactatgtgtcaaaccaaa

SEQ ID NO: 1070012 - DNA, 33 bp, Homo sapien
atactctggtcagtgattatgtgtcaaaccaaa

SEQ ID NO: 1070013 - DNA, 33 bp, Homo sapien
taagtaaaaattgtccaatggattttgggttaa

SEQ ID NO: 1070014 - DNA, 33 bp, Homo sapien
taagtaaaaattgtccgatggattttgggttaa

SEQ ID NO: 1070015 - DNA, 33 bp, Homo sapien
tgatggaccctcaaccagagttgtggatagagt

SEQ ID NO: 1070016 - DNA, 33 bp, Homo sapien
tgatggaccctcaaccggagttgtggatagagt

SEQ ID NO: 1070017 - DNA, 33 bp, Homo sapien
gtctgggtatgacatcaataggtaagtgagtcc

SEQ ID NO: 1070018 - DNA, 33 bp, Homo sapien
gtctgggtatgacatcgataggtaagtgagtcc

SEQ ID NO: 1070019 - DNA, 33 bp, Homo sapien
tttttcactttgtatcaaaggattttcagatta

SEQ ID NO: 1070020 - DNA, 33 bp, Homo sapien
tttttcactttgtatcgaaggattttcagatta

SEQ ID NO: 1070021 - DNA, 33 bp, Homo sapien
aatatccttttgattaactatgtgacctttacc

SEQ ID NO: 1070022 - DNA, 33 bp, Homo sapien
aatatccttttgattagctatgtgacctttacc

SEQ ID NO: 1070023 - DNA, 33 bp, Homo sapien
tgcaattcctcaactggattatgccatcctaag

SEQ ID NO: 1070024 - DNA, 33 bp, Homo sapien
tgcaattcctcaactgtattatgccatcctaag

SEQ ID NO: 1070025 - DNA, 33 bp, Homo sapien
tcaggacttgattctcaaaggaaataacatcta

SEQ ID NO: 1070026 - DNA, 33 bp, Homo sapien
tcaggacttgattctcgaaggaaataacatcta

SEQ ID NO: 1070027 - DNA, 33 bp, Homo sapien
atgaatgtattgagtaactaatatggaccagta

SEQ ID NO: 1070028 - DNA, 33 bp, Homo sapien
atgaatgtattgagtacctaatatggaccagta

SEQ ID NO: 1070029 - DNA, 33 bp, Homo sapien
ttattaacaattctgaaggctccacttctccct

SEQ ID NO: 1070030 - DNA, 33 bp, Homo sapien
ttattaacaattctgatggctccacttctccct

SEQ ID NO: 1070031 - DNA, 33 bp, Homo sapien
tatttatcttttaagcgctccaacaaccttctg

SEQ ID NO: 1070032 - DNA, 33 bp, Homo sapien
tatttatcttttaagctctccaacaaccttctg

SEQ ID NO: 1070033 - DNA, 33 bp, Homo sapien
agtgcaacaacaggacgctttataacatgtagg

SEQ ID NO: 1070034 - DNA, 33 bp, Homo sapien
agtgcaacaacaggactctttataacatgtagg

SEQ ID NO: 1070035 - DNA, 33 bp, Homo sapien
tggcattcttaaggtgaatccagggttaagaaa

SEQ ID NO: 1070036 - DNA, 33 bp, Homo sapien
tggcattcttaaggtggatccagggttaagaaa

SEQ ID NO: 1070037 - DNA, 33 bp, Homo sapien
aaggataataataaaaatgtttacaagctaagg

SEQ ID NO: 1070038 - DNA, 33 bp, Homo sapien
aaggataataataaaagtgtttacaagctaagg

SEQ ID NO: 1070039 - DNA, 33 bp, Homo sapien
gcctttctggtacaagcaaattgaattgctgat

SEQ ID NO: 1070040 - DNA, 33 bp, Homo sapien
gcctttctggtacaaggaaattgaattgctgat

SEQ ID NO: 1070041 - DNA, 33 bp, Homo sapien
aaatctgtgtagtcacaagaagcttggttcctt

SEQ ID NO: 1070042 - DNA, 33 bp, Homo sapien
aaatctgtgtagtcactagaagcttggttcctt

SEQ ID NO: 1070043 - DNA, 33 bp, Homo sapien
atgagatcaatgagacaaaatagagagccaaaa

SEQ ID NO: 1070044 - DNA, 33 bp, Homo sapien
atgagatcaatgagacgaaatagagagccaaaa

SEQ ID NO: 1070045 - DNA, 33 bp, Homo sapien
ccatgcaaagattaatcaaaagaaatcaggaga

SEQ ID NO: 1070046 - DNA, 33 bp, Homo sapien
ccatgcaaagattaatgaaaagaaatcaggaga

SEQ ID NO: 1070047 - DNA, 33 bp, Homo sapien
gtaaatggggagtgaacccaaaaagcatggcgg

SEQ ID NO: 1070048 - DNA, 33 bp, Homo sapien
gtaaatggggagtgaatccaaaaagcatggcgg

SEQ ID NO: 1070049 - DNA, 33 bp, Homo sapien
tttgcatttttgagacactcaatagaagattaa

SEQ ID NO: 1070050 - DNA, 33 bp, Homo sapien
tttgcatttttgagaccctcaatagaagattaa

SEQ ID NO: 1070051 - DNA, 33 bp, Homo sapien
tcagaaccacaaggcccagattctccaacacag

SEQ ID NO: 1070052 - DNA, 33 bp, Homo sapien
tcagaaccacaaggcctagattctccaacacag

SEQ ID NO: 1070053 - DNA, 33 bp, Homo sapien
aaatctaaactaactcagagcccctatggctca

SEQ ID NO: 1070054 - DNA, 33 bp, Homo sapien
aaatctaaactaactccgagcccctatggctca

SEQ ID NO: 1070055 - DNA, 33 bp, Homo sapien
tttcgccctcacttacagaagtacctgatgctt

SEQ ID NO: 1070056 - DNA, 33 bp, Homo sapien
tttcgccctcacttacggaagtacctgatgctt

SEQ ID NO: 1070057 - DNA, 33 bp, Homo sapien
aagatatgtgaaatcacagaaagttaagtggct

SEQ ID NO: 1070058 - DNA, 33 bp, Homo sapien
aagatatgtgaaatcatagaaagttaagtggct

SEQ ID NO: 1070059 - DNA, 33 bp, Homo sapien
gaacaattgttaagcacgatacaaccatgtgct

SEQ ID NO: 1070060 - DNA, 33 bp, Homo sapien
gaacaattgttaagcatgatacaaccatgtgct

SEQ ID NO: 1070061 - DNA, 33 bp, Homo sapien
cacatcccatccatcacgaaagcctagcaatta

SEQ ID NO: 1070062 - DNA, 33 bp, Homo sapien
cacatcccatccatcatgaaagcctagcaatta

SEQ ID NO: 1070063 - DNA, 33 bp, Homo sapien
aatagggaacccagaaataagcccaaataccta

SEQ ID NO: 1070064 - DNA, 33 bp, Homo sapien
aatagggaacccagaagtaagcccaaataccta

SEQ ID NO: 1070065 - DNA, 33 bp, Homo sapien
tgatgccagatggtgtcaattagtcatcttcag

SEQ ID NO: 1070066 - DNA, 33 bp, Homo sapien
tgatgccagatggtgtgaattagtcatcttcag

SEQ ID NO: 1070067 - DNA, 33 bp, Homo sapien
caaggagactgtcttacgtgtttactaactaaa

SEQ ID NO: 1070068 - DNA, 33 bp, Homo sapien
caaggagactgtcttatgtgtttactaactaaa

SEQ ID NO: 1070069 - DNA, 33 bp, Homo sapien
gtataaagattccttacaaaactagaaatggaa

SEQ ID NO: 1070070 - DNA, 33 bp, Homo sapien
gtataaagattccttagaaaactagaaatggaa

SEQ ID NO: 1070071 - DNA, 33 bp, Homo sapien
caagagcagtaagagaaaagcaatattatatgt

SEQ ID NO: 1070072 - DNA, 33 bp, Homo sapien
caagagcagtaagagacaagcaatattatatgt

SEQ ID NO: 1070073 - DNA, 33 bp, Homo sapien
ggagctgccattgaaaacctggcctgttgagtg

SEQ ID NO: 1070074 - DNA, 33 bp, Homo sapien
ggagctgccattgaaaccctggcctgttgagtg

SEQ ID NO: 1070075 - DNA, 33 bp, Homo sapien
tgtttagtttggtatacgacaaatgaggtagat

SEQ ID NO: 1070076 - DNA, 33 bp, Homo sapien
tgtttagtttggtatatgacaaatgaggtagat

SEQ ID NO: 1070077 - DNA, 33 bp, Homo sapien
tattgagttcttattacgtgttcagttctggtt

SEQ ID NO: 1070078 - DNA, 33 bp, Homo sapien
tattgagttcttattatgtgttcagttctggtt

SEQ ID NO: 1070079 - DNA, 33 bp, Homo sapien
cacacaaaatgtaaagcagaataagatggtgaa

SEQ ID NO: 1070080 - DNA, 33 bp, Homo sapien
cacacaaaatgtaaaggagaataagatggtgaa

SEQ ID NO: 1070081 - DNA, 33 bp, Homo sapien
cataataatagtgtaacggaggagataagagat

SEQ ID NO: 1070082 - DNA, 33 bp, Homo sapien
cataataatagtgtaatggaggagataagagat

SEQ ID NO: 1070083 - DNA, 33 bp, Homo sapien
atcacaatcttggtcaggaagactcttgggaag

SEQ ID NO: 1070084 - DNA, 33 bp, Homo sapien
atcacaatcttggtcatgaagactcttgggaag

SEQ ID NO: 1070085 - DNA, 33 bp, Homo sapien
tgttatcaagtcatccaaaacaagtaataaata

SEQ ID NO: 1070086 - DNA, 33 bp, Homo sapien
tgttatcaagtcatcccaaacaagtaataaata

SEQ ID NO: 1070087 - DNA, 33 bp, Homo sapien
tgaatgatttaagctacgcaagccacaggtggc

SEQ ID NO: 1070088 - DNA, 33 bp, Homo sapien
tgaatgatttaagctatgcaagccacaggtggc

SEQ ID NO: 1070089 - DNA, 33 bp, Homo sapien
tggaaaaaaatccaaacttccattgccaggtgt

SEQ ID NO: 1070090 - DNA, 33 bp, Homo sapien
tggaaaaaaatccaaatttccattgccaggtgt

SEQ ID NO: 1070091 - DNA, 33 bp, Homo sapien
actaactctatacataacttgcaaaattggata

SEQ ID NO: 1070092 - DNA, 33 bp, Homo sapien
actaactctatacatagcttgcaaaattggata

SEQ ID NO: 1070093 - DNA, 33 bp, Homo sapien
catctgaaagcaaaataaggcctaaaccaccca

SEQ ID NO: 1070094 - DNA, 33 bp, Homo sapien
catctgaaagcaaaatgaggcctaaaccaccca

SEQ ID NO: 1070095 - DNA, 33 bp, Homo sapien
atgggtagtattgccacgttaaaaatatttagt

SEQ ID NO: 1070096 - DNA, 33 bp, Homo sapien
atgggtagtattgccatgttaaaaatatttagt

SEQ ID NO: 1070097 - DNA, 33 bp, Homo sapien
gaaactgagtgatctcaataggaactgaacata

SEQ ID NO: 1070098 - DNA, 33 bp, Homo sapien
gaaactgagtgatctcgataggaactgaacata

SEQ ID NO: 1070099 - DNA, 33 bp, Homo sapien
atcttaccgtgtggtaagtttaatcctcaaggt

SEQ ID NO: 1070100 - DNA, 33 bp, Homo sapien
atcttaccgtgtggtaggtttaatcctcaaggt

SEQ ID NO: 1070101 - DNA, 33 bp, Homo sapien
ccatgaaaatggtcgactcaaactattcctcca

SEQ ID NO: 1070102 - DNA, 33 bp, Homo sapien
ccatgaaaatggtcgagtcaaactattcctcca

SEQ ID NO: 1070103 - DNA, 33 bp, Homo sapien
caaatcggctctgctaaaagatgatctggccca

SEQ ID NO: 1070104 - DNA, 33 bp, Homo sapien
caaatcggctctgctataagatgatctggccca

SEQ ID NO: 1070105 - DNA, 33 bp, Homo sapien
gatatcataatagaacactgcagaaacaatgct

SEQ ID NO: 1070106 - DNA, 33 bp, Homo sapien
gatatcataatagaacgctgcagaaacaatgct

SEQ ID NO: 1070107 - DNA, 33 bp, Homo sapien
aaataacaatgaatcaactagtgctcaaatcct

SEQ ID NO: 1070108 - DNA, 33 bp, Homo sapien
aaataacaatgaatcagctagtgctcaaatcct

SEQ ID NO: 1070109 - DNA, 33 bp, Homo sapien
tgctgcaaagccactacagctgttaactcctgg

SEQ ID NO: 1070110 - DNA, 33 bp, Homo sapien
tgctgcaaagccactatagctgttaactcctgg

SEQ ID NO: 1070111 - DNA, 33 bp, Homo sapien
tcaaagaggtggaatacctttactgatgtggac

SEQ ID NO: 1070112 - DNA, 33 bp, Homo sapien
tcaaagaggtggaatatctttactgatgtggac

SEQ ID NO: 1070113 - DNA, 33 bp, Homo sapien
tgtccagagtcaaggtcacattcccataggaga

SEQ ID NO: 1070114 - DNA, 33 bp, Homo sapien
tgtccagagtcaaggtgacattcccataggaga

SEQ ID NO: 1070115 - DNA, 33 bp, Homo sapien
tcaagttttcaccaacaatttcttctgcacata

SEQ ID NO: 1070116 - DNA, 33 bp, Homo sapien
tcaagttttcaccaacgatttcttctgcacata

SEQ ID NO: 1070117 - DNA, 33 bp, Homo sapien
ggattcagaaaagaacaatgtgctgaccaagag

SEQ ID NO: 1070118 - DNA, 33 bp, Homo sapien
ggattcagaaaagaaccatgtgctgaccaagag

SEQ ID NO: 1070119 - DNA, 33 bp, Homo sapien
attgaaatgagtgcataagtatatgagtttgca

SEQ ID NO: 1070120 - DNA, 33 bp, Homo sapien
attgaaatgagtgcatgagtatatgagtttgca

SEQ ID NO: 1070121 - DNA, 33 bp, Homo sapien
ctttatcccaaatcaacctatcccaagggaacc

SEQ ID NO: 1070122 - DNA, 33 bp, Homo sapien
ctttatcccaaatcaatctatcccaagggaacc

SEQ ID NO: 1070123 - DNA, 33 bp, Homo sapien
tgacgtgaacattgaacattcggttatatattg

SEQ ID NO: 1070124 - DNA, 33 bp, Homo sapien
tgacgtgaacattgaatattcggttatatattg

SEQ ID NO: 1070125 - DNA, 33 bp, Homo sapien
ccagggatgttagcctcagaggaaacagtccac

SEQ ID NO: 1070126 - DNA, 33 bp, Homo sapien
ccagggatgttagccttagaggaaacagtccac

SEQ ID NO: 1070127 - DNA, 33 bp, Homo sapien
ataatgctgctatctaacttggtgtacagatat

SEQ ID NO: 1070128 - DNA, 33 bp, Homo sapien
ataatgctgctatctaccttggtgtacagatat

SEQ ID NO: 1070129 - DNA, 33 bp, Homo sapien
aaaatcaccagggtcccagacagctgaactttc

SEQ ID NO: 1070130 - DNA, 33 bp, Homo sapien
aaaatcaccagggtcctagacagctgaactttc

SEQ ID NO: 1070131 - DNA, 33 bp, Homo sapien
gaatctagcttgcaaaatatcttggtatcttgt

SEQ ID NO: 1070132 - DNA, 33 bp, Homo sapien
gaatctagcttgcaaattatcttggtatcttgt

SEQ ID NO: 1070133 - DNA, 33 bp, Homo sapien
taacagtattagagagccaatttccatggcaga

SEQ ID NO: 1070134 - DNA, 33 bp, Homo sapien
taacagtattagagaggcaatttccatggcaga

SEQ ID NO: 1070135 - DNA, 33 bp, Homo sapien
gggattctcatacaccaaaagatggctcactgt

SEQ ID NO: 1070136 - DNA, 33 bp, Homo sapien
gggattctcatacaccgaaagatggctcactgt

SEQ ID NO: 1070137 - DNA, 33 bp, Homo sapien
tctctttcccgctaaacaaaaatggacatttca

SEQ ID NO: 1070138 - DNA, 33 bp, Homo sapien
tctctttcccgctaaagaaaaatggacatttca

SEQ ID NO: 1070139 - DNA, 33 bp, Homo sapien
tatctgttaggtaggacgttagaagaaaagact

SEQ ID NO: 1070140 - DNA, 33 bp, Homo sapien
tatctgttaggtaggaggttagaagaaaagact

SEQ ID NO: 1070141 - DNA, 33 bp, Homo sapien
accaacacacaaagcaataatttacatatgttt

SEQ ID NO: 1070142 - DNA, 33 bp, Homo sapien
accaacacacaaagcagtaatttacatatgttt

SEQ ID NO: 1070143 - DNA, 33 bp, Homo sapien
catgtatgactcacagaccagtatcttttcctg

SEQ ID NO: 1070144 - DNA, 33 bp, Homo sapien
catgtatgactcacaggccagtatcttttcctg

SEQ ID NO: 1070145 - DNA, 33 bp, Homo sapien
atttatgttcctaagacctacatcagcagtttt

SEQ ID NO: 1070146 - DNA, 33 bp, Homo sapien
atttatgttcctaagatctacatcagcagtttt

SEQ ID NO: 1070147 - DNA, 33 bp, Homo sapien
cagggctgaaggaaacaattttatatgagctat

SEQ ID NO: 1070148 - DNA, 33 bp, Homo sapien
cagggctgaaggaaaccattttatatgagctat

SEQ ID NO: 1070149 - DNA, 33 bp, Homo sapien
agaggatatagcctccgctttctttccttgtta

SEQ ID NO: 1070150 - DNA, 33 bp, Homo sapien
agaggatatagcctcctctttctttccttgtta

SEQ ID NO: 1070151 - DNA, 33 bp, Homo sapien
aaccttgaaaaatgagaaggagatagccaagta

SEQ ID NO: 1070152 - DNA, 33 bp, Homo sapien
aaccttgaaaaatgagtaggagatagccaagta

SEQ ID NO: 1070153 - DNA, 33 bp, Homo sapien
ttacacttcattgtgaagatttgctggggaaaa

SEQ ID NO: 1070154 - DNA, 33 bp, Homo sapien
ttacacttcattgtgaggatttgctggggaaaa

SEQ ID NO: 1070155 - DNA, 33 bp, Homo sapien
gagccagacataaaccagatgaaagtatcatgt

SEQ ID NO: 1070156 - DNA, 33 bp, Homo sapien
gagccagacataaacctgatgaaagtatcatgt

SEQ ID NO: 1070157 - DNA, 33 bp, Homo sapien
tgatttgggctcttccaaaagcctgaagaaagc

SEQ ID NO: 1070158 - DNA, 33 bp, Homo sapien
tgatttgggctcttccgaaagcctgaagaaagc

SEQ ID NO: 1070159 - DNA, 33 bp, Homo sapien
taaacaatgccttcccagatgacttttgctaaa

SEQ ID NO: 1070160 - DNA, 33 bp, Homo sapien
taaacaatgccttcccggatgacttttgctaaa

SEQ ID NO: 1070161 - DNA, 33 bp, Homo sapien
ttcacataaggccacaaatttttttcttcataa

SEQ ID NO: 1070162 - DNA, 33 bp, Homo sapien
ttcacataaggccacagatttttttcttcataa

SEQ ID NO: 1070163 - DNA, 33 bp, Homo sapien
tcttataaacatagtacgggatcttacggaagg

SEQ ID NO: 1070164 - DNA, 33 bp, Homo sapien
tcttataaacatagtatgggatcttacggaagg

SEQ ID NO: 1070165 - DNA, 33 bp, Homo sapien
agggggttcttctcataacggcagggccacact

SEQ ID NO: 1070166 - DNA, 33 bp, Homo sapien
agggggttcttctcatgacggcagggccacact

SEQ ID NO: 1070167 - DNA, 33 bp, Homo sapien
tgacaaagttactgtcaattgcctttaatgcta

SEQ ID NO: 1070168 - DNA, 33 bp, Homo sapien
tgacaaagttactgtcgattgcctttaatgcta

SEQ ID NO: 1070169 - DNA, 33 bp, Homo sapien
gtttaggagggtcgacagtcacaccaaaacaaa

SEQ ID NO: 1070170 - DNA, 33 bp, Homo sapien
gtttaggagggtcgaccgtcacaccaaaacaaa

SEQ ID NO: 1070171 - DNA, 33 bp, Homo sapien; identical to SEQ ID NO: 1070169

SEQ ID NO: 1070172 - DNA, 33 bp, Homo sapien; identical to SEQ ID NO: 1070170

SEQ ID NO: 1070173 - DNA, 33 bp, Homo sapien
tctctttttccacctagactttattccttcaga

SEQ ID NO: 1070174 - DNA, 33 bp, Homo sapien
tctctttttccacctatactttattccttcaga

SEQ ID NO: 1070175 - DNA, 33 bp, Homo sapien
gtctgggaggtccgaaatgtttactgatgccaa

SEQ ID NO: 1070176 - DNA, 33 bp, Homo sapien
gtctgggaggtccgaagtgtttactgatgccaa

SEQ ID NO: 1070177 - DNA, 33 bp, Homo sapien
gaacaaaccaaaagataaggttcaaagtccaaa

SEQ ID NO: 1070178 - DNA, 33 bp, Homo sapien
gaacaaaccaaaagatgaggttcaaagtccaaa

SEQ ID NO: 1070179 - DNA, 33 bp, Homo sapien
acaattgcattcaacgacactgacaaatattaa

SEQ ID NO: 1070180 - DNA, 33 bp, Homo sapien
acaattgcattcaacggcactgacaaatattaa

SEQ ID NO: 1070181 - DNA, 33 bp, Homo sapien
agaccttttgctgtccaactggttaaagagaat

SEQ ID NO: 1070182 - DNA, 33 bp, Homo sapien
agaccttttgctgtccgactggttaaagagaat

SEQ ID NO: 1070183 - DNA, 33 bp, Homo sapien
ttaatttccaaaaacactcattaagcatcttgt

SEQ ID NO: 1070184 - DNA, 33 bp, Homo sapien
ttaatttccaaaaacattcattaagcatcttgt

SEQ ID NO: 1070185 - DNA, 33 bp, Homo sapien
gaaaatgagcagtgacaatatatgaagacaccg

SEQ ID NO: 1070186 - DNA, 33 bp, Homo sapien
gaaaatgagcagtgacgatatatgaagacaccg

SEQ ID NO: 1070187 - DNA, 33 bp, Homo sapien
attttgtatgcattaactatccccaccttgccc

SEQ ID NO: 1070188 - DNA, 33 bp, Homo sapien
attttgtatgcattaagtatccccaccttgccc

SEQ ID NO: 1070189 - DNA, 33 bp, Homo sapien
gatgaatagatatactaagacagtagccttgtt

SEQ ID NO: 1070190 - DNA, 33 bp, Homo sapien
gatgaatagatatactcagacagtagccttgtt

SEQ ID NO: 1070191 - DNA, 33 bp, Homo sapien
tttcaaaacgactttacaactcaggataatata

SEQ ID NO: 1070192 - DNA, 33 bp, Homo sapien
tttcaaaacgactttagaactcaggataatata

SEQ ID NO: 1070193 - DNA, 33 bp, Homo sapien
ccctagtgcctagggccgcagatcttcacctcc

SEQ ID NO: 1070194 - DNA, 33 bp, Homo sapien
ccctagtgcctagggctgcagatcttcacctcc

SEQ ID NO: 1070195 - DNA, 33 bp, Homo sapien
ttaagatttagcataacgaacatccactttaaa

SEQ ID NO: 1070196 - DNA, 33 bp, Homo sapien
ttaagatttagcataatgaacatccactttaaa

SEQ ID NO: 1070197 - DNA, 33 bp, Homo sapien
tctattagcaaaatgaaagagtgaaagaaccag

SEQ ID NO: 1070198 - DNA, 33 bp, Homo sapien
tctattagcaaaatgagagagtgaaagaaccag

SEQ ID NO: 1070199 - DNA, 33 bp, Homo sapien
tgaaacagacagtcaacgtgtgctattggacat

SEQ ID NO: 1070200 - DNA, 33 bp, Homo sapien
tgaaacagacagtcaatgtgtgctattggacat

SEQ ID NO: 1070201 - DNA, 33 bp, Homo sapien
tgagatcataattcctcacccttgtctttactg

SEQ ID NO: 1070202 - DNA, 33 bp, Homo sapien
tgagatcataattccttacccttgtctttactg

SEQ ID NO: 1070203 - DNA, 33 bp, Homo sapien
aagatttgaacatgaaaagaaacagtaacaaca

SEQ ID NO: 1070204 - DNA, 33 bp, Homo sapien
aagatttgaacatgaagagaaacagtaacaaca

SEQ ID NO: 1070205 - DNA, 33 bp, Homo sapien
atagccagtaactgaaaccatagggaagattaa

SEQ ID NO: 1070206 - DNA, 33 bp, Homo sapien
atagccagtaactgaagccatagggaagattaa

SEQ ID NO: 1070207 - DNA, 33 bp, Homo sapien
ctgtattcttgattcccattcatggctactaaa

SEQ ID NO: 1070208 - DNA, 33 bp, Homo sapien
ctgtattcttgattcctattcatggctactaaa

SEQ ID NO: 1070209 - DNA, 33 bp, Homo sapien
gttaaaaaaaccactaagaggcacgattcacaa

SEQ ID NO: 1070210 - DNA, 33 bp, Homo sapien
gttaaaaaaaccactaggaggcacgattcacaa

SEQ ID NO: 1070211 - DNA, 33 bp, Homo sapien
tatttgaccaggcgatcaaaattagcatcacga

SEQ ID NO: 1070212 - DNA, 33 bp, Homo sapien
tatttgaccaggcgatgaaaattagcatcacga

SEQ ID NO: 1070213 - DNA, 33 bp, Homo sapien
atttggattggccgtgacacattgtatttaatc

SEQ ID NO: 1070214 - DNA, 33 bp, Homo sapien
atttggattggccgtggcacattgtatttaatc

SEQ ID NO: 1070215 - DNA, 33 bp, Homo sapien
ccatggtggccacaatcaatgacatggaagaaa

SEQ ID NO: 1070216 - DNA, 33 bp, Homo sapien
ccatggtggccacaatgaatgacatggaagaaa

SEQ ID NO: 1070217 - DNA, 33 bp, Homo sapien
atggcttgacctaagaagcactaacaagcatca

SEQ ID NO: 1070218 - DNA, 33 bp, Homo sapien
atggcttgacctaagatgcactaacaagcatca

SEQ ID NO: 1070219 - DNA, 33 bp, Homo sapien
taaacatttggctgctcaaagaggacactttct

SEQ ID NO: 1070220 - DNA, 33 bp, Homo sapien
taaacatttggctgcttaaagaggacactttct

SEQ ID NO: 1070221 - DNA, 33 bp, Homo sapien
cagaggaaaagaatcaatgaatgaaggtgttac

SEQ ID NO: 1070222 - DNA, 33 bp, Homo sapien
cagaggaaaagaatcattgaatgaaggtgttac

SEQ ID NO: 1070223 - DNA, 33 bp, Homo sapien
tttgcagaggttgacccatgaccaatcaggcca

SEQ ID NO: 1070224 - DNA, 33 bp, Homo sapien
tttgcagaggttgacctatgaccaatcaggcca

SEQ ID NO: 1070225 - DNA, 33 bp, Homo sapien
cacacacatttgctctcacaaaattcccacctg

SEQ ID NO: 1070226 - DNA, 33 bp, Homo sapien
cacacacatttgctctgacaaaattcccacctg

SEQ ID NO: 1070227 - DNA, 33 bp, Homo sapien
tgtgatttatgattgcagaaataacttttgttt

SEQ ID NO: 1070228 - DNA, 33 bp, Homo sapien
tgtgatttatgattgcggaaataacttttgttt

SEQ ID NO: 1070229 - DNA, 33 bp, Homo sapien
tttggtattgatggctcaaaactctgattacat

SEQ ID NO: 1070230 - DNA, 33 bp, Homo sapien
tttggtattgatggctgaaaactctgattacat

SEQ ID NO: 1070231 - DNA, 33 bp, Homo sapien
ggtgatggatgacaacccttcacacctctctgt

SEQ ID NO: 1070232 - DNA, 33 bp, Homo sapien
ggtgatggatgacaactcttcacacctctctgt

SEQ ID NO: 1070233 - DNA, 33 bp, Homo sapien
cttgtgaacaggaaaaaaaggatccctgctggc

SEQ ID NO: 1070234 - DNA, 33 bp, Homo sapien
cttgtgaacaggaaaacaaggatccctgctggc

SEQ ID NO: 1070235 - DNA, 33 bp, Homo sapien
gttcctacagttctgtaaagtatccattgcttc

SEQ ID NO: 1070236 - DNA, 33 bp, Homo sapien
gttcctacagttctgtgaagtatccattgcttc

SEQ ID NO: 1070237 - DNA, 33 bp, Homo sapien
acaattattatttcaaaacaacaaatgaggaaa

SEQ ID NO: 1070238 - DNA, 33 bp, Homo sapien
acaattattatttcaagacaacaaatgaggaaa

SEQ ID NO: 1070239 - DNA, 33 bp, Homo sapien
tgaccacattggctccactgttggtcaagatca

SEQ ID NO: 1070240 - DNA, 33 bp, Homo sapien
tgaccacattggctccgctgttggtcaagatca

SEQ ID NO: 1070241 - DNA, 33 bp, Homo sapien
aaagtacattaagcacagaatttctagaactca

SEQ ID NO: 1070242 - DNA, 33 bp, Homo sapien
aaagtacattaagcacggaatttctagaactca

SEQ ID NO: 1070243 - DNA, 33 bp, Homo sapien
cataaagaagaggaaaacgttgtcactggtaaa

SEQ ID NO: 1070244 - DNA, 33 bp, Homo sapien
cataaagaagaggaaagcgttgtcactggtaaa

SEQ ID NO: 1070245 - DNA, 33 bp, Homo sapien
aacgaatatacgtgcaaacctttaagaaattat

SEQ ID NO: 1070246 - DNA, 33 bp, Homo sapien
aacgaatatacgtgcagacctttaagaaattat

SEQ ID NO: 1070247 - DNA, 33 bp, Homo sapien
atgatgagaattgaaacacatatgttactaaga

SEQ ID NO: 1070248 - DNA, 33 bp, Homo sapien
atgatgagaattgaaatacatatgttactaaga

SEQ ID NO: 1070249 - DNA, 33 bp, Homo sapien
acaagggtactcaaatcagggtaggctctgttg

SEQ ID NO: 1070250 - DNA, 33 bp, Homo sapien
acaagggtactcaaattagggtaggctctgttg

SEQ ID NO: 1070251 - DNA, 33 bp, Homo sapien
gtaccattatacaaaaccggttgatcataaatg

SEQ ID NO: 1070252 - DNA, 33 bp, Homo sapien
gtaccattatacaaaatcggttgatcataaatg

SEQ ID NO: 1070253 - DNA, 33 bp, Homo sapien
cagctctagactcaggacaaaggaggcaaggaa

SEQ ID NO: 1070254 - DNA, 33 bp, Homo sapien
cagctctagactcagggcaaaggaggcaaggaa

SEQ ID NO: 1070255 - DNA, 33 bp, Homo sapien
aagtccctaacaaatgaatgacactgacatgtg

SEQ ID NO: 1070256 - DNA, 33 bp, Homo sapien
aagtccctaacaaatgcatgacactgacatgtg

SEQ ID NO: 1070257 - DNA, 33 bp, Homo sapien
gacacttgcagcccaaaatatgtatgaaatccc

SEQ ID NO: 1070258 - DNA, 33 bp, Homo sapien
gacacttgcagcccaagatatgtatgaaatccc

SEQ ID NO: 1070259 - DNA, 33 bp, Homo sapien
cttacagggactttatcagaccaggcaatatgg

SEQ ID NO: 1070260 - DNA, 33 bp, Homo sapien
cttacagggactttattagaccaggcaatatgg

SEQ ID NO: 1070261 - DNA, 33 bp, Homo sapien
aaggcaaaaataattacgtggaagctctaaatt

SEQ ID NO: 1070262 - DNA, 33 bp, Homo sapien
aaggcaaaaataattatgtggaagctctaaatt

SEQ ID NO: 1070263 - DNA, 33 bp, Homo sapien
gagagatgagtggactcaatccaaagtaaaagt

SEQ ID NO: 1070264 - DNA, 33 bp, Homo sapien
gagagatgagtggacttaatccaaagtaaaagt

SEQ ID NO: 1070265 - DNA, 33 bp, Homo sapien
gctaaattagtctccacagatgaaaaaaatatg

SEQ ID NO: 1070266 - DNA, 33 bp, Homo sapien
gctaaattagtctccatagatgaaaaaaatatg

SEQ ID NO: 1070267 - DNA, 33 bp, Homo sapien
aacaccaagcttccaccgagggaatttatttgt

SEQ ID NO: 1070268 - DNA, 33 bp, Homo sapien
aacaccaagcttccactgagggaatttatttgt

SEQ ID NO: 1070269 - DNA, 33 bp, Homo sapien
tttttttcagatggaggaatggaactatagtga

SEQ ID NO: 1070270 - DNA, 33 bp, Homo sapien
tttttttcagatggagtaatggaactatagtga

SEQ ID NO: 1070271 - DNA, 33 bp, Homo sapien
tttgcaaggatagagcaagagtaagaatcaaca

SEQ ID NO: 1070272 - DNA, 33 bp, Homo sapien
tttgcaaggatagagcgagagtaagaatcaaca

SEQ ID NO: 1070273 - DNA, 33 bp, Homo sapien
ccttctactctgggtacatatataatgaatcca

SEQ ID NO: 1070274 - DNA, 33 bp, Homo sapien
ccttctactctgggtatatatataatgaatcca

SEQ ID NO: 1070275 - DNA, 33 bp, Homo sapien
attgagatatcatggaacatctaaaaaattcat

SEQ ID NO: 1070276 - DNA, 33 bp, Homo sapien
attgagatatcatggaccatctaaaaaattcat

SEQ ID NO: 1070277 - DNA, 33 bp, Homo sapien
ataaagggtaagttcacctgtgattataagtga

SEQ ID NO: 1070278 - DNA, 33 bp, Homo sapien
ataaagggtaagttcatctgtgattataagtga

SEQ ID NO: 1070279 - DNA, 33 bp, Homo sapien
ctacacaggtttagaaccgcagcaatatttttc

SEQ ID NO: 1070280 - DNA, 33 bp, Homo sapien
ctacacaggtttagaagcgcagcaatatttttc

SEQ ID NO: 1070281 - DNA, 33 bp, Homo sapien
ctttacctgttttgaacgtcccttctcttttct

SEQ ID NO: 1070282 - DNA, 33 bp, Homo sapien
ctttacctgttttgaatgtcccttctcttttct

SEQ ID NO: 1070283 - DNA, 33 bp, Homo sapien
ctgccacccaacacaacaggtgctgagaacaca

SEQ ID NO: 1070284 - DNA, 33 bp, Homo sapien
ctgccacccaacacaataggtgctgagaacaca

SEQ ID NO: 1070285 - DNA, 33 bp, Homo sapien
tgagcctggtgagcaacgcactgtaaaatagcc

SEQ ID NO: 1070286 - DNA, 33 bp, Homo sapien
tgagcctggtgagcaaggcactgtaaaatagcc

SEQ ID NO: 1070287 - DNA, 33 bp, Homo sapien
aagaaaaatggaaagagaaaggacatataaaat

SEQ ID NO: 1070288 - DNA, 33 bp, Homo sapien
aagaaaaatggaaagataaaggacatataaaat

SEQ ID NO: 1070289 - DNA, 33 bp, Homo sapien
actgtcgtggactggccaggatacacgggtcac

SEQ ID NO: 1070290 - DNA, 33 bp, Homo sapien
actgtcgtggactggctaggatacacgggtcac

SEQ ID NO: 1070291 - DNA, 33 bp, Homo sapien
cataatcattatgcctaaaactaattacaatac

SEQ ID NO: 1070292 - DNA, 33 bp, Homo sapien
cataatcattatgcctgaaactaattacaatac

SEQ ID NO: 1070293 - DNA, 33 bp, Homo sapien
aaccaggattccacaacgatcaaaagccaagca

SEQ ID NO: 1070294 - DNA, 33 bp, Homo sapien
aaccaggattccacaatgatcaaaagccaagca

SEQ ID NO: 1070295 - DNA, 33 bp, Homo sapien
tgaaatttgatttatcactatctcctcctgttt

SEQ ID NO: 1070296 - DNA, 33 bp, Homo sapien
tgaaatttgatttatctctatctcctcctgttt

SEQ ID NO: 1070297 - DNA, 33 bp, Homo sapien
agaatgaaaaaaattacccttgatccccagcac

SEQ ID NO: 1070298 - DNA, 33 bp, Homo sapien
agaatgaaaaaaattatccttgatccccagcac

SEQ ID NO: 1070299 - DNA, 33 bp, Homo sapien
ttgtttctgtaacctaacatggagaaaatgtgc

SEQ ID NO: 1070300 - DNA, 33 bp, Homo sapien
ttgtttctgtaacctagcatggagaaaatgtgc

SEQ ID NO: 1070301 - DNA, 33 bp, Homo sapien
gaacagaagaggcaagaaaaaacagtgggtcac

SEQ ID NO: 1070302 - DNA, 33 bp, Homo sapien
gaacagaagaggcaaggaaaaacagtgggtcac

SEQ ID NO: 1070303 - DNA, 33 bp, Homo sapien
gcttttcatccctttaccagggcattactctgg

SEQ ID NO: 1070304 - DNA, 33 bp, Homo sapien
gcttttcatccctttagcagggcattactctgg

SEQ ID NO: 1070305 - DNA, 33 bp, Homo sapien
tttctcttgcgctataaccttgccagcatttgg

SEQ ID NO: 1070306 - DNA, 33 bp, Homo sapien
tttctcttgcgctatatccttgccagcatttgg

SEQ ID NO: 1070307 - DNA, 33 bp, Homo sapien
tggatacaagactggaaatggtaggaacccctt

SEQ ID NO: 1070308 - DNA, 33 bp, Homo sapien
tggatacaagactggagatggtaggaacccctt

SEQ ID NO: 1070309 - DNA, 33 bp, Homo sapien
atgcctccttactccaagtatgccctcttctat

SEQ ID NO: 1070310 - DNA, 33 bp, Homo sapien
atgcctccttactccaggtatgccctcttctat

SEQ ID NO: 1070311 - DNA, 33 bp, Homo sapien
caacagacctcagcaacgttgttttcccactct

SEQ ID NO: 1070312 - DNA, 33 bp, Homo sapien
caacagacctcagcaatgttgttttcccactct

SEQ ID NO: 1070313 - DNA, 33 bp, Homo sapien
atgaattagcccaacaccattttgccaaaacac

SEQ ID NO: 1070314 - DNA, 33 bp, Homo sapien
atgaattagcccaacatcattttgccaaaacac

SEQ ID NO: 1070315 - DNA, 33 bp, Homo sapien
ttgggtaatggcgggacgttagcagcagatgac

SEQ ID NO: 1070316 - DNA, 33 bp, Homo sapien
ttgggtaatggcgggatgttagcagcagatgac

SEQ ID NO: 1070317 - DNA, 33 bp, Homo sapien
accacagaccttcacacttatacagcaatgagg

SEQ ID NO: 1070318 - DNA, 33 bp, Homo sapien
accacagaccttcacatttatacagcaatgagg

SEQ ID NO: 1070319 - DNA, 33 bp, Homo sapien
gaaataataggaaggcagatttaggctcaccct

SEQ ID NO: 1070320 - DNA, 33 bp, Homo sapien
gaaataataggaaggcggatttaggctcaccct

SEQ ID NO: 1070321 - DNA, 33 bp, Homo sapien
aattgagagaatcttcaccaatatcaataatat

SEQ ID NO: 1070322 - DNA, 33 bp, Homo sapien
aattgagagaatcttcgccaatatcaataatat

SEQ ID NO: 1070323 - DNA, 33 bp, Homo sapien
aatacaataatgtaatcagaaaagttcatgtat

SEQ ID NO: 1070324 - DNA, 33 bp, Homo sapien
aatacaataatgtaatgagaaaagttcatgtat

SEQ ID NO: 1070325 - DNA, 33 bp, Homo sapien
gttttattactttcaaacacatataataacaat

SEQ ID NO: 1070326 - DNA, 33 bp, Homo sapien
gttttattactttcaagcacatataataacaat

SEQ ID NO: 1070327 - DNA, 33 bp, Homo sapien
tcagtaaaaaatcatcagagaaactcaaacaag

SEQ ID NO: 1070328 - DNA, 33 bp, Homo sapien
tcagtaaaaaatcatcggagaaactcaaacaag

SEQ ID NO: 1070329 - DNA, 33 bp, Homo sapien
cagctggtgtctgaaccaggattaaaatatcca

SEQ ID NO: 1070330 - DNA, 33 bp, Homo sapien
cagctggtgtctgaactaggattaaaatatcca

SEQ ID NO: 1070331 - DNA, 33 bp, Homo sapien
aagattgcataagataaagaggaggcagattca

SEQ ID NO: 1070332 - DNA, 33 bp, Homo sapien
aagattgcataagatacagaggaggcagattca

SEQ ID NO: 1070333 - DNA, 33 bp, Homo sapien
tcctcctctttccaacacaaaacaaaagacatg

SEQ ID NO: 1070334 - DNA, 33 bp, Homo sapien
tcctcctctttccaacgcaaaacaaaagacatg

SEQ ID NO: 1070335 - DNA, 33 bp, Homo sapien
aagttttacgtcacacaagatcctttagaaagg

SEQ ID NO: 1070336 - DNA, 33 bp, Homo sapien
aagttttacgtcacacgagatcctttagaaagg

SEQ ID NO: 1070337 - DNA, 33 bp, Homo sapien
aaagagagcctgtatcaaaagcttctcaacaat

SEQ ID NO: 1070338 - DNA, 33 bp, Homo sapien
aaagagagcctgtatcgaaagcttctcaacaat

SEQ ID NO: 1070339 - DNA, 33 bp, Homo sapien
tagttggaatcattcagatttttgcatagttca

SEQ ID NO: 1070340 - DNA, 33 bp, Homo sapien
tagttggaatcattcatatttttgcatagttca

SEQ ID NO: 1070341 - DNA, 33 bp, Homo sapien
ggcatttgtttccccccaagctcctggagttca

SEQ ID NO: 1070342 - DNA, 33 bp, Homo sapien
ggcatttgtttccccctaagctcctggagttca

SEQ ID NO: 1070343 - DNA, 33 bp, Homo sapien
tttcatttctgtatgccgaagtataagtacaaa

SEQ ID NO: 1070344 - DNA, 33 bp, Homo sapien
tttcatttctgtatgctgaagtataagtacaaa

SEQ ID NO: 1070345 - DNA, 33 bp, Homo sapien
agcttatctatctaaaataagagagcaaaccag

SEQ ID NO: 1070346 - DNA, 33 bp, Homo sapien
agcttatctatctaaactaagagagcaaaccag

SEQ ID NO: 1070347 - DNA, 33 bp, Homo sapien
gttagttgcttgtaaaagaagatgtcttacatg

SEQ ID NO: 1070348 - DNA, 33 bp, Homo sapien
gttagttgcttgtaaaggaagatgtcttacatg

SEQ ID NO: 1070349 - DNA, 33 bp, Homo sapien
gaaaattacttaaaacccttcactggctctcta

SEQ ID NO: 1070350 - DNA, 33 bp, Homo sapien
gaaaattacttaaaactcttcactggctctcta

SEQ ID NO: 1070351 - DNA, 33 bp, Homo sapien
aaggaatataatgcacaactggaattctttatt

SEQ ID NO: 1070352 - DNA, 33 bp, Homo sapien
aaggaatataatgcacgactggaattctttatt

SEQ ID NO: 1070353 - DNA, 33 bp, Homo sapien
tcagcatcggcttctgcaaggggacttgggctg

SEQ ID NO: 1070354 - DNA, 33 bp, Homo sapien
tcagcatcggcttctggaaggggacttgggctg

SEQ ID NO: 1070355 - DNA, 33 bp, Homo sapien
cattttattgaaggaacagaacttgtaaatagg

SEQ ID NO: 1070356 - DNA, 33 bp, Homo sapien
cattttattgaaggaagagaacttgtaaatagg

SEQ ID NO: 1070357 - DNA, 33 bp, Homo sapien
actcagggtctggcaccggttacaaaaggaagc

SEQ ID NO: 1070358 - DNA, 33 bp, Homo sapien
actcagggtctggcactggttacaaaaggaagc

SEQ ID NO: 1070359 - DNA, 33 bp, Homo sapien
ccttccccactagaccaaggactttgttagggc

SEQ ID NO: 1070360 - DNA, 33 bp, Homo sapien
ccttccccactagaccgaggactttgttagggc

SEQ ID NO: 1070361 - DNA, 33 bp, Homo sapien
acttaaatttttccaaatgatgaaagaatatta

SEQ ID NO: 1070362 - DNA, 33 bp, Homo sapien
acttaaatttttccaagtgatgaaagaatatta

SEQ ID NO: 1070363 - DNA, 33 bp, Homo sapien
gtacctacatgggtccaggaatgactctttgaa

SEQ ID NO: 1070364 - DNA, 33 bp, Homo sapien
gtacctacatgggtccgggaatgactctttgaa

SEQ ID NO: 1070365 - DNA, 33 bp, Homo sapien
acacaaagatgaatcactcaagggtccttccct

SEQ ID NO: 1070366 - DNA, 33 bp, Homo sapien
acacaaagatgaatcagtcaagggtccttccct

SEQ ID NO: 1070367 - DNA, 33 bp, Homo sapien
acttggtgccagttacagaaacatacactgaat

SEQ ID NO: 1070368 - DNA, 33 bp, Homo sapien
acttggtgccagttacggaaacatacactgaat

SEQ ID NO: 1070369 - DNA, 33 bp, Homo sapien
gtcccttttaagagtgccaagtaaaataataat

SEQ ID NO: 1070370 - DNA, 33 bp, Homo sapien
gtcccttttaagagtgtcaagtaaaataataat

SEQ ID NO: 1070371 - DNA, 33 bp, Homo sapien
aactgagccaagtacaaggatcttgctatattc

SEQ ID NO: 1070372 - DNA, 33 bp, Homo sapien
aactgagccaagtacagggatcttgctatattc

SEQ ID NO: 1070373 - DNA, 33 bp, Homo sapien
agcctgaaggttagcaagatgacttcatgacac

SEQ ID NO: 1070374 - DNA, 33 bp, Homo sapien
agcctgaaggttagcaggatgacttcatgacac

SEQ ID NO: 1070375 - DNA, 33 bp, Homo sapien
ctggagacaactaggcagcaggtaatacttgca

SEQ ID NO: 1070376 - DNA, 33 bp, Homo sapien
ctggagacaactaggcggcaggtaatacttgca

SEQ ID NO: 1070377 - DNA, 33 bp, Homo sapien
ctgcttatcaggccacagtatttgagaaacact

SEQ ID NO: 1070378 - DNA, 33 bp, Homo sapien
ctgcttatcaggccactgtatttgagaaacact

SEQ ID NO: 1070379 - DNA, 33 bp, Homo sapien
gtgcctatctggctcaatcctctaaaggtacct

SEQ ID NO: 1070380 - DNA, 33 bp, Homo sapien
gtgcctatctggctcagtcctctaaaggtacct

SEQ ID NO: 1070381 - DNA, 33 bp, Homo sapien
caaaagatgtatccacacttgaagcttcttgaa

SEQ ID NO: 1070382 - DNA, 33 bp, Homo sapien
caaaagatgtatccacgcttgaagcttcttgaa

SEQ ID NO: 1070383 - DNA, 33 bp, Homo sapien
acatttagagttgacaaacaatgaacggcaatc

SEQ ID NO: 1070384 - DNA, 33 bp, Homo sapien
acatttagagttgacatacaatgaacggcaatc

SEQ ID NO: 1070385 - DNA, 33 bp, Homo sapien
agatgcctgaatgcaaataatagaaaacccaac

SEQ ID NO: 1070386 - DNA, 33 bp, Homo sapien
agatgcctgaatgcaagtaatagaaaacccaac

SEQ ID NO: 1070387 - DNA, 33 bp, Homo sapien
acttatcttgctgtcactctaagtatgtagggt

SEQ ID NO: 1070388 - DNA, 33 bp, Homo sapien
acttatcttgctgtcattctaagtatgtagggt

SEQ ID NO: 1070389 - DNA, 33 bp, Homo sapien
aaggatagagtcagaaacatgaggttatggtcc

SEQ ID NO: 1070390 - DNA, 33 bp, Homo sapien
aaggatagagtcagaatcatgaggttatggtcc

SEQ ID NO: 1070391 - DNA, 33 bp, Homo sapien
ggacacagaggcgaacaaagctgatattggggt

SEQ ID NO: 1070392 - DNA, 33 bp, Homo sapien
ggacacagaggcgaaccaagctgatattggggt

SEQ ID NO: 1070393 - DNA, 33 bp, Homo sapien
acctcatccggcaaaacgctccaggcaaaaatg

SEQ ID NO: 1070394 - DNA, 33 bp, Homo sapien
acctcatccggcaaaatgctccaggcaaaaatg

SEQ ID NO: 1070395 - DNA, 33 bp, Homo sapien
tgttttggttgctatacggaggacgttgacatc

SEQ ID NO: 1070396 - DNA, 33 bp, Homo sapien
tgttttggttgctatatggaggacgttgacatc

SEQ ID NO: 1070397 - DNA, 33 bp, Homo sapien
tgtgtgcaatgctaccacctttggtttgtcaga

SEQ ID NO: 1070398 - DNA, 33 bp, Homo sapien
tgtgtgcaatgctaccgcctttggtttgtcaga

SEQ ID NO: 1070399 - DNA, 33 bp, Homo sapien
tgtagattagtttgcacctttaaaacgttcata

SEQ ID NO: 1070400 - DNA, 33 bp, Homo sapien
tgtagattagtttgcatctttaaaacgttcata

SEQ ID NO: 1070401 - DNA, 33 bp, Homo sapien
ggggagagactaataacgggtcctgggtttctt

SEQ ID NO: 1070402 - DNA, 33 bp, Homo sapien
ggggagagactaataatgggtcctgggtttctt

SEQ ID NO: 1070403 - DNA, 33 bp, Homo sapien
gtgcaggcttgtaggacggcatgacacagataa

SEQ ID NO: 1070404 - DNA, 33 bp, Homo sapien
gtgcaggcttgtaggatggcatgacacagataa

SEQ ID NO: 1070405 - DNA, 33 bp, Homo sapien
tactgtcaacacagtcactttctttcaatgcta

SEQ ID NO: 1070406 - DNA, 33 bp, Homo sapien
tactgtcaacacagtcgctttctttcaatgcta

SEQ ID NO: 1070407 - DNA, 33 bp, Homo sapien
gaaatctgattagaagccagggctcccgatctc

SEQ ID NO: 1070408 - DNA, 33 bp, Homo sapien
gaaatctgattagaagtcagggctcccgatctc

SEQ ID NO: 1070409 - DNA, 33 bp, Homo sapien
ttgtgaaagtgtataccgaagcttatttgataa

SEQ ID NO: 1070410 - DNA, 33 bp, Homo sapien
ttgtgaaagtgtatactgaagcttatttgataa

SEQ ID NO: 1070411 - DNA, 33 bp, Homo sapien
ccgtctaggagaatgcaaaagatggtttgggtg

SEQ ID NO: 1070412 - DNA, 33 bp, Homo sapien
ccgtctaggagaatgcgaaagatggtttgggtg

SEQ ID NO: 1070413 - DNA, 33 bp, Homo sapien
taacttagcccagcctcaaatctagacatttgt

SEQ ID NO: 1070414 - DNA, 33 bp, Homo sapien
taacttagcccagcctgaaatctagacatttgt

SEQ ID NO: 1070415 - DNA, 33 bp, Homo sapien
gttgactcaaagaagacgtcaccatcaagagcc

SEQ ID NO: 1070416 - DNA, 33 bp, Homo sapien
gttgactcaaagaagatgtcaccatcaagagcc

SEQ ID NO: 1070417 - DNA, 33 bp, Homo sapien
acctaaagcacatttaagacaaggtggtcttct

SEQ ID NO: 1070418 - DNA, 33 bp, Homo sapien
acctaaagcacatttaggacaaggtggtcttct

SEQ ID NO: 1070419 - DNA, 33 bp, Homo sapien
tgtgagtgacagggaactggaaacctggagaag

SEQ ID NO: 1070420 - DNA, 33 bp, Homo sapien
tgtgagtgacagggaattggaaacctggagaag

SEQ ID NO: 1070421 - DNA, 33 bp, Homo sapien
gttttgctaacagctcaagctaatcaggtacaa

SEQ ID NO: 1070422 - DNA, 33 bp, Homo sapien
gttttgctaacagctcgagctaatcaggtacaa

SEQ ID NO: 1070423 - DNA, 33 bp, Homo sapien
ctgcctgagttagcaacggtcagaacagaaagt

SEQ ID NO: 1070424 - DNA, 33 bp, Homo sapien
ctgcctgagttagcaatggtcagaacagaaagt

SEQ ID NO: 1070425 - DNA, 33 bp, Homo sapien
gtgtcttctggagtcacgtgttgaagagtaaaa

SEQ ID NO: 1070426 - DNA, 33 bp, Homo sapien
gtgtcttctggagtcatgtgttgaagagtaaaa

SEQ ID NO: 1070427 - DNA, 33 bp, Homo sapien
tggtttacatttatgaataagacaaaagcaaaa

SEQ ID NO: 1070428 - DNA, 33 bp, Homo sapien
tggtttacatttatgattaagacaaaagcaaaa

SEQ ID NO: 1070429 - DNA, 33 bp, Homo sapien
gtgtgctaggctgagacattgggactattgtag

SEQ ID NO: 1070430 - DNA, 33 bp, Homo sapien
gtgtgctaggctgagatattgggactattgtag

SEQ ID NO: 1070431 - DNA, 33 bp, Homo sapien
ggagtgaaacacaagacggcctacttgaacacc

SEQ ID NO: 1070432 - DNA, 33 bp, Homo sapien
ggagtgaaacacaagatggcctacttgaacacc

SEQ ID NO: 1070433 - DNA, 33 bp, Homo sapien
acgttgtacatattcccagcaaggacattggac

SEQ ID NO: 1070434 - DNA, 33 bp, Homo sapien
acgttgtacatattcctagcaaggacattggac

SEQ ID NO: 1070435 - DNA, 33 bp, Homo sapien
agacaagcaaaagatacgagacaaaaattgcaa

SEQ ID NO: 1070436 - DNA, 33 bp, Homo sapien
agacaagcaaaagatatgagacaaaaattgcaa

SEQ ID NO: 1070437 - DNA, 33 bp, Homo sapien
aaaagtatacccgtaacgaatgtatgttcatag

SEQ ID NO: 1070438 - DNA, 33 bp, Homo sapien
aaaagtatacccgtaatgaatgtatgttcatag

SEQ ID NO: 1070439 - DNA, 33 bp, Homo sapien
ataaatgtgaaattacaggacaaagagaaagaa

SEQ ID NO: 1070440 - DNA, 33 bp, Homo sapien
ataaatgtgaaattacgggacaaagagaaagaa

SEQ ID NO: 1070441 - DNA, 33 bp, Homo sapien
cagggcttcttgtctaaggtgggaagccatact

SEQ ID NO: 1070442 - DNA, 33 bp, Homo sapien
cagggcttcttgtctagggtgggaagccatact

SEQ ID NO: 1070443 - DNA, 33 bp, Homo sapien
atttgttctagtagacaaactttcaactaaatg

SEQ ID NO: 1070444 - DNA, 33 bp, Homo sapien
atttgttctagtagacgaactttcaactaaatg

SEQ ID NO: 1070445 - DNA, 33 bp, Homo sapien
aaaagccctgacatatcaagcctgtatttaatc

SEQ ID NO: 1070446 - DNA, 33 bp, Homo sapien
aaaagccctgacatattaagcctgtatttaatc

SEQ ID NO: 1070447 - DNA, 33 bp, Homo sapien
tgcttctattcacatcaaagggatgaaaggaat

SEQ ID NO: 1070448 - DNA, 33 bp, Homo sapien
tgcttctattcacatcgaagggatgaaaggaat

SEQ ID NO: 1070449 - DNA, 33 bp, Homo sapien
ttacattttccacaaccgcatattataccacaa

SEQ ID NO: 1070450 - DNA, 33 bp, Homo sapien
ttacattttccacaacggcatattataccacaa

SEQ ID NO: 1070451 - DNA, 33 bp, Homo sapien
aagtgaaactgacccaatagtctcatagatagt

SEQ ID NO: 1070452 - DNA, 33 bp, Homo sapien
aagtgaaactgacccagtagtctcatagatagt

SEQ ID NO: 1070453 - DNA, 33 bp, Homo sapien
tcagaagctggcctcaagaaacagaatctgatc

SEQ ID NO: 1070454 - DNA, 33 bp, Homo sapien
tcagaagctggcctcaggaaacagaatctgatc

SEQ ID NO: 1070455 - DNA, 33 bp, Homo sapien
ccagtctcatctgttacagtttgacaaatacct

SEQ ID NO: 1070456 - DNA, 33 bp, Homo sapien
ccagtctcatctgttatagtttgacaaatacct

SEQ ID NO: 1070457 - DNA, 33 bp, Homo sapien
tcctttcaaacctgaacgtagttatgaaattgg

SEQ ID NO: 1070458 - DNA, 33 bp, Homo sapien
tcctttcaaacctgaatgtagttatgaaattgg

SEQ ID NO: 1070459 - DNA, 33 bp, Homo sapien
ggaaccttcagtcctaaatgttccaccctgatt

SEQ ID NO: 1070460 - DNA, 33 bp, Homo sapien
ggaaccttcagtcctagatgttccaccctgatt

SEQ ID NO: 1070461 - DNA, 33 bp, Homo sapien
ttactgcctgtgacgacgcagctacagcgatgt

SEQ ID NO: 1070462 - DNA, 33 bp, Homo sapien
ttactgcctgtgacgatgcagctacagcgatgt

SEQ ID NO: 1070463 - DNA, 33 bp, Homo sapien
ttcttcctgcaaaatacgttaatgttaaaaaag

SEQ ID NO: 1070464 - DNA, 33 bp, Homo sapien
ttcttcctgcaaaatatgttaatgttaaaaaag

SEQ ID NO: 1070465 - DNA, 33 bp, Homo sapien
gtgtgtgtttaaatggaaaaccatcaaccaaga

SEQ ID NO: 1070466 - DNA, 33 bp, Homo sapien
gtgtgtgtttaaatgggaaaccatcaaccaaga

SEQ ID NO: 1070467 - DNA, 33 bp, Homo sapien
accatcaaccaagagaaagcagtatccactcgc

SEQ ID NO: 1070468 - DNA, 33 bp, Homo sapien
accatcaaccaagagagagcagtatccactcgc

SEQ ID NO: 1070469 - DNA, 33 bp, Homo sapien
aaaggaaggagtgtaactgaccgtgaggaatct

SEQ ID NO: 1070470 - DNA, 33 bp, Homo sapien
aaaggaaggagtgtaagtgaccgtgaggaatct

SEQ ID NO: 1070471 - DNA, 33 bp, Homo sapien
gagaatcattggtgcactatactctgatttatt

SEQ ID NO: 1070472 - DNA, 33 bp, Homo sapien
gagaatcattggtgcagtatactctgatttatt

SEQ ID NO: 1070473 - DNA, 33 bp, Homo sapien
acatttccagctaccacagtcagaggtgaagtc

SEQ ID NO: 1070474 - DNA, 33 bp, Homo sapien
acatttccagctaccatagtcagaggtgaagtc

SEQ ID NO: 1070475 - DNA, 33 bp, Homo sapien
gaaatatattgccaaagaacaaaatactactat

SEQ ID NO: 1070476 - DNA, 33 bp, Homo sapien
gaaatatattgccaaataacaaaatactactat

SEQ ID NO: 1070477 - DNA, 33 bp, Homo sapien
ttttattttgtagtcacgagaaagggacatttt

SEQ ID NO: 1070478 - DNA, 33 bp, Homo sapien
ttttattttgtagtcatgagaaagggacatttt

SEQ ID NO: 1070479 - DNA, 33 bp, Homo sapien
tgataggaagggagtgaaaccaagcaccctcat

SEQ ID NO: 1070480 - DNA, 33 bp, Homo sapien
tgataggaagggagtggaaccaagcaccctcat

SEQ ID NO: 1070481 - DNA, 33 bp, Homo sapien
gcagcaagatgaactgaacagtcaaaaataaac

SEQ ID NO: 1070482 - DNA, 33 bp, Homo sapien
gcagcaagatgaactggacagtcaaaaataaac

SEQ ID NO: 1070483 - DNA, 33 bp, Homo sapien
acaaagacttgtggtcactagtgcgctggtgcg

SEQ ID NO: 1070484 - DNA, 33 bp, Homo sapien
acaaagacttgtggtcgctagtgcgctggtgcg

SEQ ID NO: 1070485 - DNA, 33 bp, Homo sapien
tatatatattagcactaaaaacctaaagcatag

SEQ ID NO: 1070486 - DNA, 33 bp, Homo sapien
tatatatattagcactgaaaacctaaagcatag

SEQ ID NO: 1070487 - DNA, 33 bp, Homo sapien
tcctgagggtggactacggtgaagtgaactgaa

SEQ ID NO: 1070488 - DNA, 33 bp, Homo sapien
tcctgagggtggactagggtgaagtgaactgaa

SEQ ID NO: 1070489 - DNA, 33 bp, Homo sapien
aggctgtgctgagaaccgacttgacccagacca

SEQ ID NO: 1070490 - DNA, 33 bp, Homo sapien
aggctgtgctgagaactgacttgacccagacca

SEQ ID NO: 1070491 - DNA, 33 bp, Homo sapien
ctgtaggttgtctgccagagaagatagattcct

SEQ ID NO: 1070492 - DNA, 33 bp, Homo sapien
ctgtaggttgtctgccggagaagatagattcct

SEQ ID NO: 1070493 - DNA, 33 bp, Homo sapien; identical to SEQ ID NO: 1070491

SEQ ID NO: 1070494 - DNA, 33 bp, Homo sapien; identical to SEQ ID NO: 1070492

SEQ ID NO: 1070495 - DNA, 33 bp, Homo sapien
tcctgcagcagtatggcaccagtttgaaagcct

SEQ ID NO: 1070496 - DNA, 33 bp, Homo sapien
tcctgcagcagtatggtaccagtttgaaagcct

SEQ ID NO: 1070497 - DNA, 33 bp, Homo sapien
aacagaagtatgaatcaagcggctctggggaga

SEQ ID NO: 1070498 - DNA, 33 bp, Homo sapien
aacagaagtatgaatcgagcggctctggggaga

SEQ ID NO: 1070499 - DNA, 33 bp, Homo sapien
tcattgtacatgtaggcaatctttcttcttacc

SEQ ID NO: 1070500 - DNA, 33 bp, Homo sapien
tcattgtacatgtagggaatctttcttcttacc

SEQ ID NO: 1070501 - DNA, 33 bp, Homo sapien
tcatttcatgccgaaggagatgcaacaagtatt

SEQ ID NO: 1070502 - DNA, 33 bp, Homo sapien
tcatttcatgccgaagtagatgcaacaagtatt

SEQ ID NO: 1070503 - DNA, 33 bp, Homo sapien
catgatctgatttaaaatgccaacgatactatt

SEQ ID NO: 1070504 - DNA, 33 bp, Homo sapien
catgatctgatttaaagtgccaacgatactatt

SEQ ID NO: 1070505 - DNA, 33 bp, Homo sapien
cgaccaccaggacttacctaatgcctccctgaa

SEQ ID NO: 1070506 - DNA, 33 bp, Homo sapien
cgaccaccaggacttatctaatgcctccctgaa

SEQ ID NO: 1070507 - DNA, 33 bp, Homo sapien
acacagctcaatgatccaccgcaagtaaaacct

SEQ ID NO: 1070508 - DNA, 33 bp, Homo sapien
acacagctcaatgatctaccgcaagtaaaacct

SEQ ID NO: 1070509 - DNA, 33 bp, Homo sapien
cctgtcatgatgataactgatagcaggttggtt

SEQ ID NO: 1070510 - DNA, 33 bp, Homo sapien
cctgtcatgatgataagtgatagcaggttggtt

SEQ ID NO: 1070511 - DNA, 33 bp, Homo sapien
tgagtggtatgttacaaggatgtttcttgaaaa

SEQ ID NO: 1070512 - DNA, 33 bp, Homo sapien
tgagtggtatgttacagggatgtttcttgaaaa

SEQ ID NO: 1070513 - DNA, 33 bp, Homo sapien
accctgtccaagataaacatcacaactctaatc

SEQ ID NO: 1070514 - DNA, 33 bp, Homo sapien
accctgtccaagataatcatcacaactctaatc

SEQ ID NO: 1070515 - DNA, 33 bp, Homo sapien
accacatttccaaaggaactgaaatttaaatgg

SEQ ID NO: 1070516 - DNA, 33 bp, Homo sapien
accacatttccaaagggactgaaatttaaatgg

SEQ ID NO: 1070517 - DNA, 33 bp, Homo sapien
ttttctgaggactacaatgaattttattttgta

SEQ ID NO: 1070518 - DNA, 33 bp, Homo sapien
ttttctgaggactacactgaattttattttgta

SEQ ID NO: 1070519 - DNA, 33 bp, Homo sapien
tgagttaactttggtacaatatttgaggtttag

SEQ ID NO: 1070520 - DNA, 33 bp, Homo sapien
tgagttaactttggtataatatttgaggtttag

SEQ ID NO: 1070521 - DNA, 33 bp, Homo sapien
caagtgaagggaatcgacctctgatgagagcct

SEQ ID NO: 1070522 - DNA, 33 bp, Homo sapien
caagtgaagggaatcggcctctgatgagagcct

SEQ ID NO: 1070523 - DNA, 33 bp, Homo sapien
ttggagatggttaagaacaaaggaaatgggtag

SEQ ID NO: 1070524 - DNA, 33 bp, Homo sapien
ttggagatggttaagaccaaaggaaatgggtag

SEQ ID NO: 1070525 - DNA, 33 bp, Homo sapien
tgagctgggaaaaagaacatttcaccaaacagc

SEQ ID NO: 1070526 - DNA, 33 bp, Homo sapien
tgagctgggaaaaagagcatttcaccaaacagc

SEQ ID NO: 1070527 - DNA, 33 bp, Homo sapien
ccactgagggctggcacgtaacaaatagatgaa

SEQ ID NO: 1070528 - DNA, 33 bp, Homo sapien
ccactgagggctggcaggtaacaaatagatgaa

SEQ ID NO: 1070529 - DNA, 33 bp, Homo sapien
ccatctgtaccgcaataacttacggaaaaaata

SEQ ID NO: 1070530 - DNA, 33 bp, Homo sapien
ccatctgtaccgcaattacttacggaaaaaata

SEQ ID NO: 1070531 - DNA, 33 bp, Homo sapien
atgtaaatgagggaacaagaaacacacattttc

SEQ ID NO: 1070532 - DNA, 33 bp, Homo sapien
atgtaaatgagggaacgagaaacacacattttc

SEQ ID NO: 1070533 - DNA, 33 bp, Homo sapien
tggtaaaacttcaataggtggaaatcaggctag

SEQ ID NO: 1070534 - DNA, 33 bp, Homo sapien
tggtaaaacttcaatatgtggaaatcaggctag

SEQ ID NO: 1070535 - DNA, 33 bp, Homo sapien
aactaaattgcagaacagtatgtgagctatggt

SEQ ID NO: 1070536 - DNA, 33 bp, Homo sapien
aactaaattgcagaacggtatgtgagctatggt

SEQ ID NO: 1070537 - DNA, 33 bp, Homo sapien
tttactgcatactcctcactatatagctgtgtg

SEQ ID NO: 1070538 - DNA, 33 bp, Homo sapien
tttactgcatactccttactatatagctgtgtg

SEQ ID NO: 1070539 - DNA, 33 bp, Homo sapien
tctactgttgactctccccttttcttatttcaa

SEQ ID NO: 1070540 - DNA, 33 bp, Homo sapien
tctactgttgactctctccttttcttatttcaa

SEQ ID NO: 1070541 - DNA, 33 bp, Homo sapien
tttatttaaagaatgaccaatctgagggcaatg

SEQ ID NO: 1070542 - DNA, 33 bp, Homo sapien
tttatttaaagaatgatcaatctgagggcaatg

SEQ ID NO: 1070543 - DNA, 33 bp, Homo sapien
ttgaaatctattgagaagtaagacacagaagcc

SEQ ID NO: 1070544 - DNA, 33 bp, Homo sapien
ttgaaatctattgagaggtaagacacagaagcc

SEQ ID NO: 1070545 - DNA, 33 bp, Homo sapien
tatatatacacttacaaatttacatacatatac

SEQ ID NO: 1070546 - DNA, 33 bp, Homo sapien
tatatatacacttacacatttacatacatatac

SEQ ID NO: 1070547 - DNA, 33 bp, Homo sapien
gacttccagtaagagacagaaggcaaaggaggg

SEQ ID NO: 1070548 - DNA, 33 bp, Homo sapien
gacttccagtaagagatagaaggcaaaggaggg

SEQ ID NO: 1070549 - DNA, 33 bp, Homo sapien
gacgttgtgtttgccaagtaaatcaagtcagct

SEQ ID NO: 1070550 - DNA, 33 bp, Homo sapien
gacgttgtgtttgccacgtaaatcaagtcagct

SEQ ID NO: 1070551 - DNA, 33 bp, Homo sapien
agttcagacaatgtaaatccctcgtgcaaggcc

SEQ ID NO: 1070552 - DNA, 33 bp, Homo sapien
agttcagacaatgtaagtccctcgtgcaaggcc

SEQ ID NO: 1070553 - DNA, 33 bp, Homo sapien
tttacaactttacaaccaggatactgtgcagta

SEQ ID NO: 1070554 - DNA, 33 bp, Homo sapien
tttacaactttacaactaggatactgtgcagta

SEQ ID NO: 1070555 - DNA, 33 bp, Homo sapien
atggtttgtcagctgaaccgctgggtaaatagt

SEQ ID NO: 1070556 - DNA, 33 bp, Homo sapien
atggtttgtcagctgagccgctgggtaaatagt

SEQ ID NO: 1070557 - DNA, 33 bp, Homo sapien
ttttaatttaaaagcacggtgagtagtattagc

SEQ ID NO: 1070558 - DNA, 33 bp, Homo sapien
ttttaatttaaaagcatggtgagtagtattagc

SEQ ID NO: 1070559 - DNA, 33 bp, Homo sapien
aaggaaaatgagtctccagtaacagggtaagaa

SEQ ID NO: 1070560 - DNA, 33 bp, Homo sapien
aaggaaaatgagtctctagtaacagggtaagaa

SEQ ID NO: 1070561 - DNA, 33 bp, Homo sapien
atttattctgctgtcgcacttctttactgcatg

SEQ ID NO: 1070562 - DNA, 33 bp, Homo sapien
atttattctgctgtcgtacttctttactgcatg

SEQ ID NO: 1070563 - DNA, 33 bp, Homo sapien
aaggaggagaggatacaccagttagtgatctga

SEQ ID NO: 1070564 - DNA, 33 bp, Homo sapien
aaggaggagaggatacgccagttagtgatctga

SEQ ID NO: 1070565 - DNA, 33 bp, Homo sapien
tgagtgttctcagatcaccacctggcataccct

SEQ ID NO: 1070566 - DNA, 33 bp, Homo sapien
tgagtgttctcagatcgccacctggcataccct

SEQ ID NO: 1070567 - DNA, 33 bp, Homo sapien
ggaaaccaagtaggacaatccaacttataagtt

SEQ ID NO: 1070568 - DNA, 33 bp, Homo sapien
ggaaaccaagtaggaccatccaacttataagtt

SEQ ID NO: 1070569 - DNA, 33 bp, Homo sapien
ttatagggagcttcagcaataacctgttccatc

SEQ ID NO: 1070570 - DNA, 33 bp, Homo sapien
ttatagggagcttcagtaataacctgttccatc

SEQ ID NO: 1070571 - DNA, 33 bp, Homo sapien
ctccttcaatttcttcccacgatttcaaaaagt

SEQ ID NO: 1070572 - DNA, 33 bp, Homo sapien
ctccttcaatttcttctcacgatttcaaaaagt

SEQ ID NO: 1070573 - DNA, 33 bp, Homo sapien
atggaaactaagtaagacagtacaactaataag

SEQ ID NO: 1070574 - DNA, 33 bp, Homo sapien
atggaaactaagtaaggcagtacaactaataag

SEQ ID NO: 1070575 - DNA, 33 bp, Homo sapien; identical to SEQ ID NO: 1070573

SEQ ID NO: 1070576 - DNA, 33 bp, Homo sapien; identical to SEQ ID NO: 1070574

SEQ ID NO: 1070577 - DNA, 33 bp, Homo sapien
cagaagctggggatcaacagtaaatagcctata

SEQ ID NO: 1070578 - DNA, 33 bp, Homo sapien
cagaagctggggatcagcagtaaatagcctata

SEQ ID NO: 1070579 - DNA, 33 bp, Homo sapien
taacatgatttcccagaagcattaaatatttgt

SEQ ID NO: 1070580 - DNA, 33 bp, Homo sapien
taacatgatttcccagtagcattaaatatttgt

SEQ ID NO: 1070581 - DNA, 33 bp, Homo sapien
agtgtgcaccaaacaacaaatgcccaggcactg

SEQ ID NO: 1070582 - DNA, 33 bp, Homo sapien
agtgtgcaccaaacaataaatgcccaggcactg

SEQ ID NO: 1070583 - DNA, 33 bp, Homo sapien
aggttgactagaaaaaagtattgcagctacgga

SEQ ID NO: 1070584 - DNA, 33 bp, Homo sapien
aggttgactagaaaaaggtattgcagctacgga

SEQ ID NO: 1070585 - DNA, 33 bp, Homo sapien; identical to SEQ ID NO: 1070569

SEQ ID NO: 1070586 - DNA, 33 bp, Homo sapien; identical to SEQ ID NO: 1070570

SEQ ID NO: 1070587 - DNA, 33 bp, Homo sapien
accatcagggaagcagcaaggtgggtgcaaaaa

SEQ ID NO: 1070588 - DNA, 33 bp, Homo sapien
accatcagggaagcagtaaggtgggtgcaaaaa

SEQ ID NO: 1070589 - DNA, 33 bp, Homo sapien
atggaaaatggtcaaacgcctcctgatggcttc

SEQ ID NO: 1070590 - DNA, 33 bp, Homo sapien
atggaaaatggtcaaatgcctcctgatggcttc

SEQ ID NO: 1070591 - DNA, 33 bp, Homo sapien
gacttctttgggtgcaatatctcagttgaggat

SEQ ID NO: 1070592 - DNA, 33 bp, Homo sapien
gacttctttgggtgcactatctcagttgaggat

SEQ ID NO: 1070593 - DNA, 33 bp, Homo sapien
attaaaggcacagtgtcaattaggtagcagcag

SEQ ID NO: 1070594 - DNA, 33 bp, Homo sapien
attaaaggcacagtgtgaattaggtagcagcag

SEQ ID NO: 1070595 - DNA, 33 bp, Homo sapien
tggcccaaaggtcagacagaaccccaaagaaga

SEQ ID NO: 1070596 - DNA, 33 bp, Homo sapien
tggcccaaaggtcagatagaaccccaaagaaga

SEQ ID NO: 1070597 - DNA, 33 bp, Homo sapien
cacctgtgggaggaaacgttaccagcaatttct

SEQ ID NO: 1070598 - DNA, 33 bp, Homo sapien
cacctgtgggaggaaatgttaccagcaatttct

SEQ ID NO: 1070599 - DNA, 33 bp, Homo sapien; identical to SEQ ID NO: 1070597

SEQ ID NO: 1070600 - DNA, 33 bp, Homo sapien; identical to SEQ ID NO: 1070598

SEQ ID NO: 1070601 - DNA, 33 bp, Homo sapien
ttttaaatgattggtacgttcattctgagagaa

SEQ ID NO: 1070602 - DNA, 33 bp, Homo sapien
ttttaaatgattggtatgttcattctgagagaa

SEQ ID NO: 1070603 - DNA, 33 bp, Homo sapien
ctctcccaggtataaccagctggaaaagtgaca

SEQ ID NO: 1070604 - DNA, 33 bp, Homo sapien
ctctcccaggtataactagctggaaaagtgaca

SEQ ID NO: 1070605 - DNA, 33 bp, Homo sapien
cctcaaattgaggctaagaaagaatatacaaca

SEQ ID NO: 1070606 - DNA, 33 bp, Homo sapien
cctcaaattgaggctaggaaagaatatacaaca

SEQ ID NO: 1070607 - DNA, 33 bp, Homo sapien
catgtatagagtaaaaagcattcgcatgatctg

SEQ ID NO: 1070608 - DNA, 33 bp, Homo sapien
catgtatagagtaaaaggcattcgcatgatctg

SEQ ID NO: 1070609 - DNA, 33 bp, Homo sapien
aagccttgtgaaaccaacctgtggacttggaat

SEQ ID NO: 1070610 - DNA, 33 bp, Homo sapien
aagccttgtgaaaccatcctgtggacttggaat

SEQ ID NO: 1070611 - DNA, 33 bp, Homo sapien
gccaatgctctaagaactctactgcaatgtgac

SEQ ID NO: 1070612 - DNA, 33 bp, Homo sapien
gccaatgctctaagaattctactgcaatgtgac

SEQ ID NO: 1070613 - DNA, 33 bp, Homo sapien
ctcccaggatatcacacgctctgacgctattgc

SEQ ID NO: 1070614 - DNA, 33 bp, Homo sapien
ctcccaggatatcacatgctctgacgctattgc

SEQ ID NO: 1070615 - DNA, 33 bp, Homo sapien
ttatttagactatacactcaagatggtgaaaga

SEQ ID NO: 1070616 - DNA, 33 bp, Homo sapien
ttatttagactatacattcaagatggtgaaaga

SEQ ID NO: 1070617 - DNA, 33 bp, Homo sapien
gatttacttaatcaaaaccctgttgttggactt

SEQ ID NO: 1070618 - DNA, 33 bp, Homo sapien
gatttacttaatcaaatccctgttgttggactt

SEQ ID NO: 1070619 - DNA, 33 bp, Homo sapien
ggctagtctccaaatcaacaccaaccagatgtc

SEQ ID NO: 1070620 - DNA, 33 bp, Homo sapien
ggctagtctccaaatcgacaccaaccagatgtc

SEQ ID NO: 1070621 - DNA, 33 bp, Homo sapien
ctggcagccacattggaataagtgtgcaatttc

SEQ ID NO: 1070622 - DNA, 33 bp, Homo sapien
ctggcagccacattgggataagtgtgcaatttc

SEQ ID NO: 1070623 - DNA, 33 bp, Homo sapien
taagcagaagggaccaaaagtgtgaagggccac

SEQ ID NO: 1070624 - DNA, 33 bp, Homo sapien
taagcagaagggaccacaagtgtgaagggccac

SEQ ID NO: 1070625 - DNA, 33 bp, Homo sapien
gcatttcttggttcctcagatatgtgctgcact

SEQ ID NO: 1070626 - DNA, 33 bp, Homo sapien
gcatttcttggttccttagatatgtgctgcact

SEQ ID NO: 1070627 - DNA, 33 bp, Homo sapien
cattccctcaactttccaaagttcccataagga

SEQ ID NO: 1070628 - DNA, 33 bp, Homo sapien
cattccctcaactttctaaagttcccataagga

SEQ ID NO: 1070629 - DNA, 33 bp, Homo sapien
agtcttgtaaatctcacggagttacatttctta

SEQ ID NO: 1070630 - DNA, 33 bp, Homo sapien
agtcttgtaaatctcatggagttacatttctta

SEQ ID NO: 1070631 - DNA, 33 bp, Homo sapien
aatgtgaagaggatataaaagatacattttaca

SEQ ID NO: 1070632 - DNA, 33 bp, Homo sapien
aatgtgaagaggatatcaaagatacattttaca

SEQ ID NO: 1070633 - DNA, 33 bp, Homo sapien
caccctccaatagtgagatttttttcccatctc

SEQ ID NO: 1070634 - DNA, 33 bp, Homo sapien
caccctccaatagtgatatttttttcccatctc

SEQ ID NO: 1070635 - DNA, 33 bp, Homo sapien
tcaatccagtgatataaccttccgtcctcaaca

SEQ ID NO: 1070636 - DNA, 33 bp, Homo sapien
tcaatccagtgatatagccttccgtcctcaaca

SEQ ID NO: 1070637 - DNA, 33 bp, Homo sapien
ctggtaagtgccaaaacgccaaatccagcttcc

SEQ ID NO: 1070638 - DNA, 33 bp, Homo sapien
ctggtaagtgccaaaatgccaaatccagcttcc

SEQ ID NO: 1070639 - DNA, 33 bp, Homo sapien
caatttccatcaaggacaatggataaacaaatt

SEQ ID NO: 1070640 - DNA, 33 bp, Homo sapien
caatttccatcaaggagaatggataaacaaatt

SEQ ID NO: 1070641 - DNA, 33 bp, Homo sapien
ggctgtggggtcaaggaaggaatgttcgtgccc

SEQ ID NO: 1070642 - DNA, 33 bp, Homo sapien
ggctgtggggtcaagggaggaatgttcgtgccc

SEQ ID NO: 1070643 - DNA, 33 bp, Homo sapien
ttcactctctctaaaaaggttagcagcaatggt

SEQ ID NO: 1070644 - DNA, 33 bp, Homo sapien
ttcactctctctaaaatggttagcagcaatggt

SEQ ID NO: 1070645 - DNA, 33 bp, Homo sapien
tctgtacccatctgcccagcaagaaagagacac

SEQ ID NO: 1070646 - DNA, 33 bp, Homo sapien
tctgtacccatctgcctagcaagaaagagacac

SEQ ID NO: 1070647 - DNA, 33 bp, Homo sapien
ggcctggctctccctactagactgtgagctaca

SEQ ID NO: 1070648 - DNA, 33 bp, Homo sapien
ggcctggctctccctattagactgtgagctaca

SEQ ID NO: 1070649 - DNA, 33 bp, Homo sapien
tattttaaaagtatcaatgaaaccaaaccatat

SEQ ID NO: 1070650 - DNA, 33 bp, Homo sapien
tattttaaaagtatcagtgaaaccaaaccatat

SEQ ID NO: 1070651 - DNA, 33 bp, Homo sapien
ggtggaattagataaacggatacttcaagaggc

SEQ ID NO: 1070652 - DNA, 33 bp, Homo sapien
ggtggaattagataaatggatacttcaagaggc

SEQ ID NO: 1070653 - DNA, 33 bp, Homo sapien
gagaatggaatcttggaaacactaaacacttag

SEQ ID NO: 1070654 - DNA, 33 bp, Homo sapien
gagaatggaatcttgggaacactaaacacttag

SEQ ID NO: 1070655 - DNA, 33 bp, Homo sapien
aagtccaaactttttacgccctctaggatacgg

SEQ ID NO: 1070656 - DNA, 33 bp, Homo sapien
aagtccaaactttttatgccctctaggatacgg

SEQ ID NO: 1070657 - DNA, 33 bp, Homo sapien
ggtgttgttgtggaaaaatgagtgaacctgaac

SEQ ID NO: 1070658 - DNA, 33 bp, Homo sapien
ggtgttgttgtggaaagatgagtgaacctgaac

SEQ ID NO: 1070659 - DNA, 33 bp, Homo sapien
tttcttcccatttacactggaaagtctcaaaac

SEQ ID NO: 1070660 - DNA, 33 bp, Homo sapien
tttcttcccatttacattggaaagtctcaaaac

SEQ ID NO: 1070661 - DNA, 33 bp, Homo sapien
acaaatatacccaccacgagtgcttcagcctca

SEQ ID NO: 1070662 - DNA, 33 bp, Homo sapien
acaaatatacccaccatgagtgcttcagcctca

SEQ ID NO: 1070663 - DNA, 33 bp, Homo sapien
gacctttaggtcatataaacagccaccaaaccc

SEQ ID NO: 1070664 - DNA, 33 bp, Homo sapien
gacctttaggtcatatgaacagccaccaaaccc

SEQ ID NO: 1070665 - DNA, 33 bp, Homo sapien
aatggtctgtctacacaatggtcagataatagt

SEQ ID NO: 1070666 - DNA, 33 bp, Homo sapien
aatggtctgtctacacgatggtcagataatagt

SEQ ID NO: 1070667 - DNA, 33 bp, Homo sapien
agaaaaggtctaattagccactgggccctttcc

SEQ ID NO: 1070668 - DNA, 33 bp, Homo sapien
agaaaaggtctaattatccactgggccctttcc

SEQ ID NO: 1070669 - DNA, 33 bp, Homo sapien
gagcaaagccttagccaatgaataggacacttg

SEQ ID NO: 1070670 - DNA, 33 bp, Homo sapien
gagcaaagccttagccgatgaataggacacttg

SEQ ID NO: 1070671 - DNA, 33 bp, Homo sapien
ctgaaattcatcctacagaagtaaccgcaaaac

SEQ ID NO: 1070672 - DNA, 33 bp, Homo sapien
ctgaaattcatcctacggaagtaaccgcaaaac

SEQ ID NO: 1070673 - DNA, 33 bp, Homo sapien
cccggcttatgctctcaatccatttcggctgag

SEQ ID NO: 1070674 - DNA, 33 bp, Homo sapien
cccggcttatgctctcgatccatttcggctgag

SEQ ID NO: 1070675 - DNA, 33 bp, Homo sapien
attagggaggtcttcgaaataagcctcaacctg

SEQ ID NO: 1070676 - DNA, 33 bp, Homo sapien
attagggaggtcttcggaataagcctcaacctg

SEQ ID NO: 1070677 - DNA, 33 bp, Homo sapien
ctcctacttaatcagaacctctatgtcagcagc

SEQ ID NO: 1070678 - DNA, 33 bp, Homo sapien
ctcctacttaatcagagcctctatgtcagcagc

SEQ ID NO: 1070679 - DNA, 33 bp, Homo sapien
ggcctaatgaaagaccaaaataaacaataggcc

SEQ ID NO: 1070680 - DNA, 33 bp, Homo sapien
ggcctaatgaaagaccgaaataaacaataggcc

SEQ ID NO: 1070681 - DNA, 33 bp, Homo sapien
aattgtattattgtaaacattgggagctggaga

SEQ ID NO: 1070682 - DNA, 33 bp, Homo sapien
aattgtattattgtaatcattgggagctggaga

SEQ ID NO: 1070683 - DNA, 33 bp, Homo sapien
gtaaactattgagacactcaacaacccggatgg

SEQ ID NO: 1070684 - DNA, 33 bp, Homo sapien
gtaaactattgagacagtcaacaacccggatgg

SEQ ID NO: 1070685 - DNA, 33 bp, Homo sapien
tgtaatcagttgcaaacataggtatgctttgag

SEQ ID NO: 1070686 - DNA, 33 bp, Homo sapien
tgtaatcagttgcaaatataggtatgctttgag

SEQ ID NO: 1070687 - DNA, 33 bp, Homo sapien
gaaattagaaggtgtaggtggttgaaagatttc

SEQ ID NO: 1070688 - DNA, 33 bp, Homo sapien
gaaattagaaggtgtatgtggttgaaagatttc

SEQ ID NO: 1070689 - DNA, 33 bp, Homo sapien
caaatgatgtcaaagaaggtagagttgcactgg

SEQ ID NO: 1070690 - DNA, 33 bp, Homo sapien
caaatgatgtcaaagagggtagagttgcactgg

SEQ ID NO: 1070691 - DNA, 33 bp, Homo sapien
aaggaaggagcctgcacggatagaagcagaatt

SEQ ID NO: 1070692 - DNA, 33 bp, Homo sapien
aaggaaggagcctgcatggatagaagcagaatt

SEQ ID NO: 1070693 - DNA, 33 bp, Homo sapien
atgctttttggcataaagacaccatgtggaaac

SEQ ID NO: 1070694 - DNA, 33 bp, Homo sapien
atgctttttggcataatgacaccatgtggaaac

SEQ ID NO: 1070695 - DNA, 33 bp, Homo sapien
actgatgtgacagtgaaggtaagcaatccaggg

SEQ ID NO: 1070696 - DNA, 33 bp, Homo sapien
actgatgtgacagtgagggtaagcaatccaggg

SEQ ID NO: 1070697 - DNA, 33 bp, Homo sapien
ctatgaagttgtaagaagtaggtttgtactgta

SEQ ID NO: 1070698 - DNA, 33 bp, Homo sapien
ctatgaagttgtaagacgtaggtttgtactgta

SEQ ID NO: 1070699 - DNA, 33 bp, Homo sapien
aagttagtgatgcacacgagaaaaacctttccc

SEQ ID NO: 1070700 - DNA, 33 bp, Homo sapien
aagttagtgatgcacatgagaaaaacctttccc

SEQ ID NO: 1070701 - DNA, 33 bp, Homo sapien
tagtttctaagaaagtaaaacacaccctatgac

SEQ ID NO: 1070702 - DNA, 33 bp, Homo sapien
tagtttctaagaaagttaaacacaccctatgac

SEQ ID NO: 1070703 - DNA, 33 bp, Homo sapien
atcctatgtgggccaaatgttatgggttgaaga

SEQ ID NO: 1070704 - DNA, 33 bp, Homo sapien
atcctatgtgggccaattgttatgggttgaaga

SEQ ID NO: 1070705 - DNA, 33 bp, Homo sapien
tgcacataaaagagacagagctgagtcaaatca

SEQ ID NO: 1070706 - DNA, 33 bp, Homo sapien
tgcacataaaagagacggagctgagtcaaatca

SEQ ID NO: 1070707 - DNA, 33 bp, Homo sapien
tcaaatttctttatgactatcaccaaaatttgt

SEQ ID NO: 1070708 - DNA, 33 bp, Homo sapien
tcaaatttctttatgattatcaccaaaatttgt

SEQ ID NO: 1070709 - DNA, 33 bp, Homo sapien
tctgaatgaataggaacgtagcaaagctgtgct

SEQ ID NO: 1070710 - DNA, 33 bp, Homo sapien
tctgaatgaataggaaggtagcaaagctgtgct

SEQ ID NO: 1070711 - DNA, 33 bp, Homo sapien
gctctctgatgtttaggcacaggaagaaagaga

SEQ ID NO: 1070712 - DNA, 33 bp, Homo sapien
gctctctgatgtttagtcacaggaagaaagaga

SEQ ID NO: 1070713 - DNA, 33 bp, Homo sapien
ttgcagaaggagccaggctactctgaccgggtg

SEQ ID NO: 1070714 - DNA, 33 bp, Homo sapien
ttgcagaaggagccagtctactctgaccgggtg

SEQ ID NO: 1070715 - DNA, 33 bp, Homo sapien
gcaccttgccttggcaccagcagggggagttta

SEQ ID NO: 1070716 - DNA, 33 bp, Homo sapien
gcaccttgccttggcagcagcagggggagttta

SEQ ID NO: 1070717 - DNA, 33 bp, Homo sapien
tgacaagcaaaacaaactgctgtggcatggtga

SEQ ID NO: 1070718 - DNA, 33 bp, Homo sapien
tgacaagcaaaacaaagtgctgtggcatggtga

SEQ ID NO: 1070719 - DNA, 33 bp, Homo sapien
accattagagaggccactagacagacatcactt

SEQ ID NO: 1070720 - DNA, 33 bp, Homo sapien
accattagagaggccattagacagacatcactt

SEQ ID NO: 1070721 - DNA, 33 bp, Homo sapien
tatttctgttgtcacaaagttctctttcattac

SEQ ID NO: 1070722 - DNA, 33 bp, Homo sapien
tatttctgttgtcacagagttctctttcattac

SEQ ID NO: 1070723 - DNA, 33 bp, Homo sapien
ctcaattttggagaagcagccaatttgctttat

SEQ ID NO: 1070724 - DNA, 33 bp, Homo sapien
ctcaattttggagaagtagccaatttgctttat

SEQ ID NO: 1070725 - DNA, 33 bp, Homo sapien
ttttcaaaatcttatcgcattggttttatgtta

SEQ ID NO: 1070726 - DNA, 33 bp, Homo sapien
ttttcaaaatcttatctcattggttttatgtta

SEQ ID NO: 1070727 - DNA, 33 bp, Homo sapien
gcttacaagggaatgactataatgaatccaagc

SEQ ID NO: 1070728 - DNA, 33 bp, Homo sapien
gcttacaagggaatgattataatgaatccaagc

SEQ ID NO: 1070729 - DNA, 33 bp, Homo sapien
aggaatggcaaagaaacgggaagaatccaggtt

SEQ ID NO: 1070730 - DNA, 33 bp, Homo sapien
aggaatggcaaagaaatgggaagaatccaggtt

SEQ ID NO: 1070731 - DNA, 33 bp, Homo sapien
taacctagccagtcaacgtaggcacttggaagt

SEQ ID NO: 1070732 - DNA, 33 bp, Homo sapien
taacctagccagtcaatgtaggcacttggaagt

SEQ ID NO: 1070733 - DNA, 33 bp, Homo sapien
taaaggattaaagaaaactcagagtctctggga

SEQ ID NO: 1070734 - DNA, 33 bp, Homo sapien
taaaggattaaagaaagctcagagtctctggga

SEQ ID NO: 1070735 - DNA, 33 bp, Homo sapien
tccaaaggctcagcaaactaaactttcattgga

SEQ ID NO: 1070736 - DNA, 33 bp, Homo sapien
tccaaaggctcagcaagctaaactttcattgga

SEQ ID NO: 1070737 - DNA, 33 bp, Homo sapien
atacttgctaattgtacgttctaagatcctttg

SEQ ID NO: 1070738 - DNA, 33 bp, Homo sapien
atacttgctaattgtatgttctaagatcctttg

SEQ ID NO: 1070739 - DNA, 33 bp, Homo sapien
atgtgtattactaaaactgtgcaaacctggaga

SEQ ID NO: 1070740 - DNA, 33 bp, Homo sapien
atgtgtattactaaaattgtgcaaacctggaga

SEQ ID NO: 1070741 - DNA, 33 bp, Homo sapien
aggcactaaggagataacaatgcactagacaaa

SEQ ID NO: 1070742 - DNA, 33 bp, Homo sapien
aggcactaaggagatagcaatgcactagacaaa

SEQ ID NO: 1070743 - DNA, 33 bp, Homo sapien
gacagcacagtggaaagtaacagccactaactc

SEQ ID NO: 1070744 - DNA, 33 bp, Homo sapien
gacagcacagtggaaattaacagccactaactc

SEQ ID NO: 1070745 - DNA, 33 bp, Homo sapien
gttcagtgtggttacagatcttcttctatgtgt

SEQ ID NO: 1070746 - DNA, 33 bp, Homo sapien
gttcagtgtggttacatatcttcttctatgtgt

SEQ ID NO: 1070747 - DNA, 33 bp, Homo sapien
cacagctcagaggtgaacagtggcctgcaagga

SEQ ID NO: 1070748 - DNA, 33 bp, Homo sapien
cacagctcagaggtgagcagtggcctgcaagga

SEQ ID NO: 1070749 - DNA, 33 bp, Homo sapien
agacctgttatcttcacctttcaaactcctctt

SEQ ID NO: 1070750 - DNA, 33 bp, Homo sapien
agacctgttatcttcatctttcaaactcctctt

SEQ ID NO: 1070751 - DNA, 33 bp, Homo sapien
tggtagagtcacttgaacatgaatcacctaagg

SEQ ID NO: 1070752 - DNA, 33 bp, Homo sapien
tggtagagtcacttgatcatgaatcacctaagg

SEQ ID NO: 1070753 - DNA, 33 bp, Homo sapien
tggaaagaaacttcctaaaatgttatctcccaa

SEQ ID NO: 1070754 - DNA, 33 bp, Homo sapien
tggaaagaaacttcctgaaatgttatctcccaa

SEQ ID NO: 1070755 - DNA, 33 bp, Homo sapien
ttttcctggctgagtcaaggggtgcaaaaggag

SEQ ID NO: 1070756 - DNA, 33 bp, Homo sapien
ttttcctggctgagtcgaggggtgcaaaaggag

SEQ ID NO: 1070757 - DNA, 33 bp, Homo sapien
tatcccaaagccatctcacatttggtatgctct

SEQ ID NO: 1070758 - DNA, 33 bp, Homo sapien
tatcccaaagccatcttacatttggtatgctct

SEQ ID NO: 1070759 - DNA, 33 bp, Homo sapien
aacactgttacaaagaaagggaaagtttgtggt

SEQ ID NO: 1070760 - DNA, 33 bp, Homo sapien
aacactgttacaaagagagggaaagtttgtggt

SEQ ID NO: 1070761 - DNA, 33 bp, Homo sapien
atagattggaagagacaaggaaaagaggatcag

SEQ ID NO: 1070762 - DNA, 33 bp, Homo sapien
atagattggaagagacgaggaaaagaggatcag

SEQ ID NO: 1070763 - DNA, 33 bp, Homo sapien
cagcctaacatgcttacaacctgtttacaagct

SEQ ID NO: 1070764 - DNA, 33 bp, Homo sapien
cagcctaacatgcttataacctgtttacaagct

SEQ ID NO: 1070765 - DNA, 33 bp, Homo sapien
ctctattcggcagagaccacttgtttttggcaa

SEQ ID NO: 1070766 - DNA, 33 bp, Homo sapien
ctctattcggcagagatcacttgtttttggcaa

SEQ ID NO: 1070767 - DNA, 33 bp, Homo sapien
ttgagttaattggtccacaatgaggcccagcca

SEQ ID NO: 1070768 - DNA, 33 bp, Homo sapien
ttgagttaattggtccgcaatgaggcccagcca

SEQ ID NO: 1070769 - DNA, 33 bp, Homo sapien
ctttttctactccttaagttttgcaagaaccca

SEQ ID NO: 1070770 - DNA, 33 bp, Homo sapien
ctttttctactccttaggttttgcaagaaccca

SEQ ID NO: 1070771 - DNA, 33 bp, Homo sapien
aggtttgttatataggaaagctcgtgtcatggc

SEQ ID NO: 1070772 - DNA, 33 bp, Homo sapien
aggtttgttatataggtaagctcgtgtcatggc

SEQ ID NO: 1070773 - DNA, 33 bp, Homo sapien
tgggatacaggaggccagacaataagaagcaaa

SEQ ID NO: 1070774 - DNA, 33 bp, Homo sapien
tgggatacaggaggccggacaataagaagcaaa

SEQ ID NO: 1070775 - DNA, 33 bp, Homo sapien
caaaactatcaacacaatggaaaaatgagctca

SEQ ID NO: 1070776 - DNA, 33 bp, Homo sapien
caaaactatcaacacagtggaaaaatgagctca

SEQ ID NO: 1070777 - DNA, 33 bp, Homo sapien; identical to SEQ ID NO: 1070775

SEQ ID NO: 1070778 - DNA, 33 bp, Homo sapien; identical to SEQ ID NO: 1070776

SEQ ID NO: 1070779 - DNA, 33 bp, Homo sapien
ctgttccagtaaagggacagaaattgacacgag

SEQ ID NO: 1070780 - DNA, 33 bp, Homo sapien
ctgttccagtaaaggggcagaaattgacacgag

SEQ ID NO: 1070781 - DNA, 33 bp, Homo sapien
aagtagtttagtaacactgcaatttacataaaa

SEQ ID NO: 1070782 - DNA, 33 bp, Homo sapien
aagtagtttagtaacagtgcaatttacataaaa

SEQ ID NO: 1070783 - DNA, 33 bp, Homo sapien
agtcacacatgcttaaaagaggtgacgttgaag

SEQ ID NO: 1070784 - DNA, 33 bp, Homo sapien
agtcacacatgcttaagagaggtgacgttgaag

SEQ ID NO: 1070785 - DNA, 33 bp, Homo sapien
agtacttagtttatgccgagcagtggttgatat

SEQ ID NO: 1070786 - DNA, 33 bp, Homo sapien
agtacttagtttatgcggagcagtggttgatat

SEQ ID NO: 1070787 - DNA, 33 bp, Homo sapien
aggcaggtcatatagaagagaggatcgtatgga

SEQ ID NO: 1070788 - DNA, 33 bp, Homo sapien
aggcaggtcatatagaggagaggatcgtatgga

SEQ ID NO: 1070789 - DNA, 33 bp, Homo sapien
gagagaagatactagcaacaaatgttggaaact

SEQ ID NO: 1070790 - DNA, 33 bp, Homo sapien
gagagaagatactagcgacaaatgttggaaact

SEQ ID NO: 1070791 - DNA, 33 bp, Homo sapien
aaaaaaagtaatcttggactgaattgcactatt

SEQ ID NO: 1070792 - DNA, 33 bp, Homo sapien
aaaaaaagtaatcttgtactgaattgcactatt

SEQ ID NO: 1070793 - DNA, 33 bp, Homo sapien
atggaaaaatgctgaaaatttaaccatcatacc

SEQ ID NO: 1070794 - DNA, 33 bp, Homo sapien
atggaaaaatgctgaacatttaaccatcatacc

SEQ ID NO: 1070795 - DNA, 33 bp, Homo sapien
aacaaactaaccatgccgaggtacgcccctcag

SEQ ID NO: 1070796 - DNA, 33 bp, Homo sapien
aacaaactaaccatgctgaggtacgcccctcag

SEQ ID NO: 1070797 - DNA, 33 bp, Homo sapien
cacttgacatagtgacggcctattttcttcctc

SEQ ID NO: 1070798 - DNA, 33 bp, Homo sapien
cacttgacatagtgactgcctattttcttcctc

SEQ ID NO: 1070799 - DNA, 33 bp, Homo sapien
agttgcaaagaaaacaaagtcatgctattaagc

SEQ ID NO: 1070800 - DNA, 33 bp, Homo sapien
agttgcaaagaaaacagagtcatgctattaagc

SEQ ID NO: 1070801 - DNA, 33 bp, Homo sapien
aaactcaaattgataacgaggaatttgcatttt

SEQ ID NO: 1070802 - DNA, 33 bp, Homo sapien
aaactcaaattgataatgaggaatttgcatttt

SEQ ID NO: 1070803 - DNA, 33 bp, Homo sapien
cagccagggttaagacccaatgatctagtccaa

SEQ ID NO: 1070804 - DNA, 33 bp, Homo sapien
cagccagggttaagactcaatgatctagtccaa

SEQ ID NO: 1070805 - DNA, 33 bp, Homo sapien
caaaatttatggaagacgagttatacattccat

SEQ ID NO: 1070806 - DNA, 33 bp, Homo sapien
caaaatttatggaagaggagttatacattccat

SEQ ID NO: 1070807 - DNA, 33 bp, Homo sapien
gtctagtctgacagaaggccttttaatggatca

SEQ ID NO: 1070808 - DNA, 33 bp, Homo sapien
gtctagtctgacagaatgccttttaatggatca

SEQ ID NO: 1070809 - DNA, 33 bp, Homo sapien
ggagatatggtctttacgtagggataatcaagt

SEQ ID NO: 1070810 - DNA, 33 bp, Homo sapien
ggagatatggtctttatgtagggataatcaagt

SEQ ID NO: 1070811 - DNA, 33 bp, Homo sapien
ataaaagactgcaatacggcatatcataagcat

SEQ ID NO: 1070812 - DNA, 33 bp, Homo sapien
ataaaagactgcaatatggcatatcataagcat

SEQ ID NO: 1070813 - DNA, 33 bp, Homo sapien
gtatcaaatcagagaaatctatattgcacctcc

SEQ ID NO: 1070814 - DNA, 33 bp, Homo sapien
gtatcaaatcagagaagtctatattgcacctcc

SEQ ID NO: 1070815 - DNA, 33 bp, Homo sapien
tgagtagctggtaaggccaaggcaccaaagtga

SEQ ID NO: 1070816 - DNA, 33 bp, Homo sapien
tgagtagctggtaaggtcaaggcaccaaagtga

SEQ ID NO: 1070817 - DNA, 33 bp, Homo sapien
gggagattgctgccaaatgatactgagtttcat

SEQ ID NO: 1070818 - DNA, 33 bp, Homo sapien
gggagattgctgccaagtgatactgagtttcat

SEQ ID NO: 1070819 - DNA, 33 bp, Homo sapien
agggatctgggctggacatataaccttaggagt

SEQ ID NO: 1070820 - DNA, 33 bp, Homo sapien
agggatctgggctggagatataaccttaggagt

SEQ ID NO: 1070821 - DNA, 33 bp, Homo sapien
aaaggtgcaattcctacgtacagccaaaaggtg

SEQ ID NO: 1070822 - DNA, 33 bp, Homo sapien
aaaggtgcaattcctaggtacagccaaaaggtg

SEQ ID NO: 1070823 - DNA, 33 bp, Homo sapien
gcactgttcaagtcaaactgttcaaaaaacttt

SEQ ID NO: 1070824 - DNA, 33 bp, Homo sapien
gcactgttcaagtcaatctgttcaaaaaacttt

SEQ ID NO: 1070825 - DNA, 33 bp, Homo sapien
ctacttttccttttcccaaggcaaatccctagg

SEQ ID NO: 1070826 - DNA, 33 bp, Homo sapien
ctacttttccttttccgaaggcaaatccctagg

SEQ ID NO: 1070827 - DNA, 33 bp, Homo sapien
tttgactatcttccaaccctagtgaactggcct

SEQ ID NO: 1070828 - DNA, 33 bp, Homo sapien
tttgactatcttccaatcctagtgaactggcct

SEQ ID NO: 1070829 - DNA, 33 bp, Homo sapien
tcccagttcaaaggacaattgggatacatttta

SEQ ID NO: 1070830 - DNA, 33 bp, Homo sapien
tcccagttcaaaggactattgggatacatttta

SEQ ID NO: 1070831 - DNA, 33 bp, Homo sapien
gttcaaaagcaagagacggaaattacagggatt

SEQ ID NO: 1070832 - DNA, 33 bp, Homo sapien
gttcaaaagcaagagatggaaattacagggatt

SEQ ID NO: 1070833 - DNA, 33 bp, Homo sapien
ggtggctaagagaggcaaagaagaggctttcct

SEQ ID NO: 1070834 - DNA, 33 bp, Homo sapien
ggtggctaagagaggcgaagaagaggctttcct

SEQ ID NO: 1070835 - DNA, 33 bp, Homo sapien
ctgtcctaactgtgcaagggaaaattccagtca

SEQ ID NO: 1070836 - DNA, 33 bp, Homo sapien
ctgtcctaactgtgcaggggaaaattccagtca

SEQ ID NO: 1070837 - DNA, 33 bp, Homo sapien
atattttgtggttgaccaaacaaaataatagtg

SEQ ID NO: 1070838 - DNA, 33 bp, Homo sapien
atattttgtggttgactaaacaaaataatagtg

SEQ ID NO: 1070839 - DNA, 33 bp, Homo sapien
ctgtgatgctagattaaagttggaaatattatg

SEQ ID NO: 1070840 - DNA, 33 bp, Homo sapien
ctgtgatgctagattagagttggaaatattatg

SEQ ID NO: 1070841 - DNA, 33 bp, Homo sapien
gtagtagcaccctaaaacatccaatagcaaaga

SEQ ID NO: 1070842 - DNA, 33 bp, Homo sapien
gtagtagcaccctaaatcatccaatagcaaaga

SEQ ID NO: 1070843 - DNA, 33 bp, Homo sapien
aattaaatatccttacaacttttcatatgttag

SEQ ID NO: 1070844 - DNA, 33 bp, Homo sapien
aattaaatatccttacgacttttcatatgttag

SEQ ID NO: 1070845 - DNA, 33 bp, Homo sapien
cagacatacagcataaatgtatcgaggacaaaa

SEQ ID NO: 1070846 - DNA, 33 bp, Homo sapien
cagacatacagcataagtgtatcgaggacaaaa

SEQ ID NO: 1070847 - DNA, 33 bp, Homo sapien
gaagtgctctcattcacgtatgtaacaaacttt

SEQ ID NO: 1070848 - DNA, 33 bp, Homo sapien
gaagtgctctcattcatgtatgtaacaaacttt

SEQ ID NO: 1070849 - DNA, 33 bp, Homo sapien
atctgagtttctagcccgcaagtatctttgatt

SEQ ID NO: 1070850 - DNA, 33 bp, Homo sapien
atctgagtttctagccggcaagtatctttgatt

SEQ ID NO: 1070851 - DNA, 33 bp, Homo sapien
gaaggctcagctgagaacttatagttgaggaca

SEQ ID NO: 1070852 - DNA, 33 bp, Homo sapien
gaaggctcagctgagaccttatagttgaggaca

SEQ ID NO: 1070853 - DNA, 33 bp, Homo sapien
ctctgggcctcaggcacatcatcagtacaaacg

SEQ ID NO: 1070854 - DNA, 33 bp, Homo sapien
ctctgggcctcaggcatatcatcagtacaaacg

SEQ ID NO: 1070855 - DNA, 33 bp, Homo sapien
tgtgacggtacaaagaaagggcttctatttgtt

SEQ ID NO: 1070856 - DNA, 33 bp, Homo sapien
tgtgacggtacaaagacagggcttctatttgtt

SEQ ID NO: 1070857 - DNA, 33 bp, Homo sapien
gggagaggaccagaaaacgtaactattgtgtac

SEQ ID NO: 1070858 - DNA, 33 bp, Homo sapien
gggagaggaccagaaagcgtaactattgtgtac

SEQ ID NO: 1070859 - DNA, 33 bp, Homo sapien
agtctattgattcaaacggtaatctttttcata

SEQ ID NO: 1070860 - DNA, 33 bp, Homo sapien
agtctattgattcaaagggtaatctttttcata

SEQ ID NO: 1070861 - DNA, 33 bp, Homo sapien
accctggcttttacagaccaagattctgggggc

SEQ ID NO: 1070862 - DNA, 33 bp, Homo sapien
accctggcttttacagtccaagattctgggggc

SEQ ID NO: 1070863 - DNA, 33 bp, Homo sapien
caaatctcagtatcaacgcagtgctagctctat

SEQ ID NO: 1070864 - DNA, 33 bp, Homo sapien
caaatctcagtatcaaggcagtgctagctctat

SEQ ID NO: 1070865 - DNA, 33 bp, Homo sapien
tccttgactttcttctcactttcattgacagtt

SEQ ID NO: 1070866 - DNA, 33 bp, Homo sapien
tccttgactttcttcttactttcattgacagtt

SEQ ID NO: 1070867 - DNA, 33 bp, Homo sapien
gctcattcattcgttgaaaaaatatttactgaa

SEQ ID NO: 1070868 - DNA, 33 bp, Homo sapien
gctcattcattcgttggaaaaatatttactgaa

SEQ ID NO: 1070869 - DNA, 33 bp, Homo sapien
atctgggttgaaaaaaacatcacaatttggatg

SEQ ID NO: 1070870 - DNA, 33 bp, Homo sapien
atctgggttgaaaaaaccatcacaatttggatg

SEQ ID NO: 1070871 - DNA, 33 bp, Homo sapien
cagcaatactgttaaaagagcatggagaggtga

SEQ ID NO: 1070872 - DNA, 33 bp, Homo sapien
cagcaatactgttaaatgagcatggagaggtga

SEQ ID NO: 1070873 - DNA, 33 bp, Homo sapien
taaaatttcaggaggaagtagtttaaggagaaa

SEQ ID NO: 1070874 - DNA, 33 bp, Homo sapien
taaaatttcaggaggaggtagtttaaggagaaa

SEQ ID NO: 1070875 - DNA, 33 bp, Homo sapien
gctgctcaataaaaatcatttcagtggcagagt

SEQ ID NO: 1070876 - DNA, 33 bp, Homo sapien
gctgctcaataaaaatgatttcagtggcagagt

SEQ ID NO: 1070877 - DNA, 33 bp, Homo sapien
tttctctcacttccaccagagcttgaactatat

SEQ ID NO: 1070878 - DNA, 33 bp, Homo sapien
tttctctcacttccactagagcttgaactatat

SEQ ID NO: 1070879 - DNA, 33 bp, Homo sapien
tataatgtcaaacaaacagattctgcttttctc

SEQ ID NO: 1070880 - DNA, 33 bp, Homo sapien
tataatgtcaaacaaagagattctgcttttctc

SEQ ID NO: 1070881 - DNA, 33 bp, Homo sapien
ttcagcccttgagtgacgaccgattagtattgg

SEQ ID NO: 1070882 - DNA, 33 bp, Homo sapien
ttcagcccttgagtgaggaccgattagtattgg

SEQ ID NO: 1070883 - DNA, 33 bp, Homo sapien
ttctatactgcctttaaattggtttcctatttg

SEQ ID NO: 1070884 - DNA, 33 bp, Homo sapien
ttctatactgcctttatattggtttcctatttg

SEQ ID NO: 1070885 - DNA, 33 bp, Homo sapien
gaattatttcatttaaccttcccaatgagtaag

SEQ ID NO: 1070886 - DNA, 33 bp, Homo sapien
gaattatttcatttaatcttcccaatgagtaag

SEQ ID NO: 1070887 - DNA, 33 bp, Homo sapien
tcaaatagacaggcaactaaaatgtggagtaac

SEQ ID NO: 1070888 - DNA, 33 bp, Homo sapien
tcaaatagacaggcaattaaaatgtggagtaac

SEQ ID NO: 1070889 - DNA, 33 bp, Homo sapien
gagaagtggctttacaactgggtgattggcaga

SEQ ID NO: 1070890 - DNA, 33 bp, Homo sapien
gagaagtggctttacagctgggtgattggcaga

SEQ ID NO: 1070891 - DNA, 33 bp, Homo sapien
gagctgtatgaagagcagataagagattccaca

SEQ ID NO: 1070892 - DNA, 33 bp, Homo sapien
gagctgtatgaagagccgataagagattccaca

SEQ ID NO: 1070893 - DNA, 33 bp, Homo sapien
gttgttcttcccagagactaaagtgagggcccc

SEQ ID NO: 1070894 - DNA, 33 bp, Homo sapien
gttgttcttcccagagtctaaagtgagggcccc

SEQ ID NO: 1070895 - DNA, 33 bp, Homo sapien
taaatgaaaacgtgcaacatattaggatcaatc

SEQ ID NO: 1070896 - DNA, 33 bp, Homo sapien
taaatgaaaacgtgcagcatattaggatcaatc

SEQ ID NO: 1070897 - DNA, 33 bp, Homo sapien
ctattgctacttccaacgaagacacatatacaa

SEQ ID NO: 1070898 - DNA, 33 bp, Homo sapien
ctattgctacttccaatgaagacacatatacaa

SEQ ID NO: 1070899 - DNA, 33 bp, Homo sapien
ctctctaaatctgccacgtaaggactaaacact

SEQ ID NO: 1070900 - DNA, 33 bp, Homo sapien
ctctctaaatctgccatgtaaggactaaacact

SEQ ID NO: 1070901 - DNA, 33 bp, Homo sapien
agctctgctttttaaacgctggtcatgatccat

SEQ ID NO: 1070902 - DNA, 33 bp, Homo sapien
agctctgctttttaaatgctggtcatgatccat

SEQ ID NO: 1070903 - DNA, 33 bp, Homo sapien
cccaactaaacagatgaatcataggctcacaca

SEQ ID NO: 1070904 - DNA, 33 bp, Homo sapien
cccaactaaacagatggatcataggctcacaca

SEQ ID NO: 1070905 - DNA, 33 bp, Homo sapien
taggaggcacatagtacgtaagtaagcatctct

SEQ ID NO: 1070906 - DNA, 33 bp, Homo sapien
taggaggcacatagtatgtaagtaagcatctct

SEQ ID NO: 1070907 - DNA, 33 bp, Homo sapien
aagacctgaatgggaacgataaacaccaaattc

SEQ ID NO: 1070908 - DNA, 33 bp, Homo sapien
aagacctgaatgggaatgataaacaccaaattc

SEQ ID NO: 1070909 - DNA, 33 bp, Homo sapien
ggcagccagaagcataacaatgactcataaagc

SEQ ID NO: 1070910 - DNA, 33 bp, Homo sapien
ggcagccagaagcatagcaatgactcataaagc

SEQ ID NO: 1070911 - DNA, 33 bp, Homo sapien
aaaaatatggccttaacgttattcctaaattag

SEQ ID NO: 1070912 - DNA, 33 bp, Homo sapien
aaaaatatggccttaatgttattcctaaattag

SEQ ID NO: 1070913 - DNA, 33 bp, Homo sapien
tttttgggactgaaaaataattgattactgctg

SEQ ID NO: 1070914 - DNA, 33 bp, Homo sapien
tttttgggactgaaaactaattgattactgctg

SEQ ID NO: 1070915 - DNA, 33 bp, Homo sapien
gaccctgttgtacccacaggctgaaaaaacctg

SEQ ID NO: 1070916 - DNA, 33 bp, Homo sapien
gaccctgttgtacccataggctgaaaaaacctg

SEQ ID NO: 1070917 - DNA, 33 bp, Homo sapien
agtttgagcttaaccaactggaagacagactga

SEQ ID NO: 1070918 - DNA, 33 bp, Homo sapien
agtttgagcttaaccacctggaagacagactga

SEQ ID NO: 1070919 - DNA, 33 bp, Homo sapien
tgttcaagtacactgcacttttcctcttaaaac

SEQ ID NO: 1070920 - DNA, 33 bp, Homo sapien
tgttcaagtacactgcgcttttcctcttaaaac

SEQ ID NO: 1070921 - DNA, 33 bp, Homo sapien
caatctcttacttgataatactttgagaatgaa

SEQ ID NO: 1070922 - DNA, 33 bp, Homo sapien
caatctcttacttgatgatactttgagaatgaa

SEQ ID NO: 1070923 - DNA, 33 bp, Homo sapien
atttttgattgtagaaaggctttttccatctgg

SEQ ID NO: 1070924 - DNA, 33 bp, Homo sapien
atttttgattgtagaagggctttttccatctgg

SEQ ID NO: 1070925 - DNA, 33 bp, Homo sapien
tctgtttggagagagactatacttttgtgtttt

SEQ ID NO: 1070926 - DNA, 33 bp, Homo sapien
tctgtttggagagagattatacttttgtgtttt

SEQ ID NO: 1070927 - DNA, 33 bp, Homo sapien
agttcagatgctccaagatcttatagcatttat

SEQ ID NO: 1070928 - DNA, 33 bp, Homo sapien
agttcagatgctccaatatcttatagcatttat

SEQ ID NO: 1070929 - DNA, 33 bp, Homo sapien
aaggcaattaagcaatcattatttaagaaacac

SEQ ID NO: 1070930 - DNA, 33 bp, Homo sapien
aaggcaattaagcaatgattatttaagaaacac

SEQ ID NO: 1070931 - DNA, 33 bp, Homo sapien
actcgggccagttcaacttcagatgcccttgag

SEQ ID NO: 1070932 - DNA, 33 bp, Homo sapien
actcgggccagttcaatttcagatgcccttgag

SEQ ID NO: 1070933 - DNA, 33 bp, Homo sapien
ataggaagagataatcgaagaatatgcagctta

SEQ ID NO: 1070934 - DNA, 33 bp, Homo sapien
ataggaagagataatctaagaatatgcagctta

SEQ ID NO: 1070935 - DNA, 33 bp, Homo sapien
tttattactgctattcaaatattccaatcctgc

SEQ ID NO: 1070936 - DNA, 33 bp, Homo sapien
tttattactgctattcgaatattccaatcctgc

SEQ ID NO: 1070937 - DNA, 33 bp, Homo sapien
aacaaataaatgggaactcaattgacctaatga

SEQ ID NO: 1070938 - DNA, 33 bp, Homo sapien
aacaaataaatgggaattcaattgacctaatga

SEQ ID NO: 1070939 - DNA, 33 bp, Homo sapien
tttctttttttttgtaagccatcttagtaggtg

SEQ ID NO: 1070940 - DNA, 33 bp, Homo sapien
tttctttttttttgtatgccatcttagtaggtg

SEQ ID NO: 1070941 - DNA, 33 bp, Homo sapien
tcagtaaggccaagcaaatcctatgatatccaa

SEQ ID NO: 1070942 - DNA, 33 bp, Homo sapien
tcagtaaggccaagcacatcctatgatatccaa

SEQ ID NO: 1070943 - DNA, 33 bp, Homo sapien
aaacattcaggatataaactcaccaggtctatc

SEQ ID NO: 1070944 - DNA, 33 bp, Homo sapien
aaacattcaggatatacactcaccaggtctatc

SEQ ID NO: 1070945 - DNA, 33 bp, Homo sapien
ggaaatgtagccaaccaatcatctacacaaagg

SEQ ID NO: 1070946 - DNA, 33 bp, Homo sapien
ggaaatgtagccaaccgatcatctacacaaagg

SEQ ID NO: 1070947 - DNA, 33 bp, Homo sapien
tagctacaaatacccacgctgttctaccgacat

SEQ ID NO: 1070948 - DNA, 33 bp, Homo sapien
tagctacaaatacccatgctgttctaccgacat

SEQ ID NO: 1070949 - DNA, 33 bp, Homo sapien
atttgtttactcttataaagaatgttgcagtga

SEQ ID NO: 1070950 - DNA, 33 bp, Homo sapien
atttgtttactcttatgaagaatgttgcagtga

SEQ ID NO: 1070951 - DNA, 33 bp, Homo sapien
ataggccttttaagaaaatcatagagtcattga

SEQ ID NO: 1070952 - DNA, 33 bp, Homo sapien
ataggccttttaagaagatcatagagtcattga

SEQ ID NO: 1070953 - DNA, 33 bp, Homo sapien
ctagcataccaagcagcagtcagaaggccacag

SEQ ID NO: 1070954 - DNA, 33 bp, Homo sapien
ctagcataccaagcagtagtcagaaggccacag

SEQ ID NO: 1070955 - DNA, 33 bp, Homo sapien
atgcacagctcaaaaagtaagtgaaaaattaag

SEQ ID NO: 1070956 - DNA, 33 bp, Homo sapien
atgcacagctcaaaaattaagtgaaaaattaag

SEQ ID NO: 1070957 - DNA, 33 bp, Homo sapien
ctccctatacccaggcaaaaggaacacccttat

SEQ ID NO: 1070958 - DNA, 33 bp, Homo sapien
ctccctatacccaggcgaaaggaacacccttat

SEQ ID NO: 1070959 - DNA, 33 bp, Homo sapien
atggcaggtgcacttacgactctctgatctttc

SEQ ID NO: 1070960 - DNA, 33 bp, Homo sapien
atggcaggtgcacttatgactctctgatctttc

SEQ ID NO: 1070961 - DNA, 33 bp, Homo sapien
aaaagagagtactatacgacaacctactgtaaa

SEQ ID NO: 1070962 - DNA, 33 bp, Homo sapien
aaaagagagtactatatgacaacctactgtaaa

SEQ ID NO: 1070963 - DNA, 33 bp, Homo sapien
agaagatttgaaagagaatggggacctatgatt

SEQ ID NO: 1070964 - DNA, 33 bp, Homo sapien
agaagatttgaaagaggatggggacctatgatt

SEQ ID NO: 1070965 - DNA, 33 bp, Homo sapien
aacaaacaaacattaacccatgctattgtagaa

SEQ ID NO: 1070966 - DNA, 33 bp, Homo sapien
aacaaacaaacattaatccatgctattgtagaa

SEQ ID NO: 1070967 - DNA, 33 bp, Homo sapien
tctatatatgaaggacaagaaatgacaaatcca

SEQ ID NO: 1070968 - DNA, 33 bp, Homo sapien
tctatatatgaaggacgagaaatgacaaatcca

SEQ ID NO: 1070969 - DNA, 33 bp, Homo sapien
aacttatttacccttacaagtcaggctataaag

SEQ ID NO: 1070970 - DNA, 33 bp, Homo sapien
aacttatttacccttataagtcaggctataaag

SEQ ID NO: 1070971 - DNA, 33 bp, Homo sapien
aggcttagacatttgccctttactttcaactag

SEQ ID NO: 1070972 - DNA, 33 bp, Homo sapien
aggcttagacatttgctctttactttcaactag

SEQ ID NO: 1070973 - DNA, 33 bp, Homo sapien
ggtttgacaggaaaaaaagtcattaacattaat

SEQ ID NO: 1070974 - DNA, 33 bp, Homo sapien
ggtttgacaggaaaaagagtcattaacattaat

SEQ ID NO: 1070975 - DNA, 33 bp, Homo sapien
agtactttacagcatcactcaattttgacatca

SEQ ID NO: 1070976 - DNA, 33 bp, Homo sapien
agtactttacagcatcgctcaattttgacatca

SEQ ID NO: 1070977 - DNA, 33 bp, Homo sapien
ctgagggatgaatatacctgaaaacagaaagac

SEQ ID NO: 1070978 - DNA, 33 bp, Homo sapien
ctgagggatgaatatatctgaaaacagaaagac

SEQ ID NO: 1070979 - DNA, 33 bp, Homo sapien
tattctggcatttcacagcctcatcaaatatca

SEQ ID NO: 1070980 - DNA, 33 bp, Homo sapien
tattctggcatttcacggcctcatcaaatatca

SEQ ID NO: 1070981 - DNA, 33 bp, Homo sapien
ccagaaacaaagacaaatgactaaagacaacat

SEQ ID NO: 1070982 - DNA, 33 bp, Homo sapien
ccagaaacaaagacaagtgactaaagacaacat

SEQ ID NO: 1070983 - DNA, 33 bp, Homo sapien
tcatcttggcttgcaacctaatacaatcttcaa

SEQ ID NO: 1070984 - DNA, 33 bp, Homo sapien
tcatcttggcttgcaatctaatacaatcttcaa

SEQ ID NO: 1070985 - DNA, 33 bp, Homo sapien
acggtgttgtagaaaaagcaatagaactttccc

SEQ ID NO: 1070986 - DNA, 33 bp, Homo sapien
acggtgttgtagaaaaggcaatagaactttccc

SEQ ID NO: 1070987 - DNA, 33 bp, Homo sapien
gaatcttggcaatctccactatttccttttcca

SEQ ID NO: 1070988 - DNA, 33 bp, Homo sapien
gaatcttggcaatctctactatttccttttcca

SEQ ID NO: 1070989 - DNA, 33 bp, Homo sapien
attcataatttcatagacagtaactgaagtgtg

SEQ ID NO: 1070990 - DNA, 33 bp, Homo sapien
attcataatttcataggcagtaactgaagtgtg

SEQ ID NO: 1070991 - DNA, 33 bp, Homo sapien
ctctgaaatgtttcaaaaaatgtgaataaatta

SEQ ID NO: 1070992 - DNA, 33 bp, Homo sapien
ctctgaaatgtttcaagaaatgtgaataaatta

SEQ ID NO: 1070993 - DNA, 33 bp, Homo sapien
aatctccaggcccataaatggtgtgtgccagta

SEQ ID NO: 1070994 - DNA, 33 bp, Homo sapien
aatctccaggcccatagatggtgtgtgccagta

SEQ ID NO: 1070995 - DNA, 33 bp, Homo sapien
tctatgcgccaatattaaaatagctgaaaaaga

SEQ ID NO: 1070996 - DNA, 33 bp, Homo sapien
tctatgcgccaatatttaaatagctgaaaaaga

SEQ ID NO: 1070997 - DNA, 33 bp, Homo sapien
tttaagaatgagaacactaatacagaacccatc

SEQ ID NO: 1070998 - DNA, 33 bp, Homo sapien
tttaagaatgagaacattaatacagaacccatc

SEQ ID NO: 1070999 - DNA, 33 bp, Homo sapien
acattcatgatagaaactgaagaataaacaaat

SEQ ID NO: 1071000 - DNA, 33 bp, Homo sapien
acattcatgatagaaattgaagaataaacaaat

SEQ ID NO: 1071001 - DNA, 33 bp, Homo sapien
ttgacaaattcagaaaggtctcaaagcgcatac

SEQ ID NO: 1071002 - DNA, 33 bp, Homo sapien
ttgacaaattcagaaatgtctcaaagcgcatac

SEQ ID NO: 1071003 - DNA, 33 bp, Homo sapien
cttgccttctatgtaacgtatcaccgggtagaa

SEQ ID NO: 1071004 - DNA, 33 bp, Homo sapien
cttgccttctatgtaatgtatcaccgggtagaa

SEQ ID NO: 1071005 - DNA, 33 bp, Homo sapien
agcagaaggacattgcagagtgtgagttaatga

SEQ ID NO: 1071006 - DNA, 33 bp, Homo sapien
agcagaaggacattgcggagtgtgagttaatga

SEQ ID NO: 1071007 - DNA, 33 bp, Homo sapien
gtctgtagccattgaaagctttagcatctctcc

SEQ ID NO: 1071008 - DNA, 33 bp, Homo sapien
gtctgtagccattgaaggctttagcatctctcc

SEQ ID NO: 1071009 - DNA, 33 bp, Homo sapien
agtgagaatttaggtaacatgagctgaatcatt

SEQ ID NO: 1071010 - DNA, 33 bp, Homo sapien
agtgagaatttaggtagcatgagctgaatcatt

SEQ ID NO: 1071011 - DNA, 33 bp, Homo sapien
atttaaaatgataagtaaaagctacaaggaaat

SEQ ID NO: 1071012 - DNA, 33 bp, Homo sapien
atttaaaatgataagtcaaagctacaaggaaat

SEQ ID NO: 1071013 - DNA, 33 bp, Homo sapien
tctttttggattaaaaattgcctgtgaatgaaa

SEQ ID NO: 1071014 - DNA, 33 bp, Homo sapien
tctttttggattaaaacttgcctgtgaatgaaa

SEQ ID NO: 1071015 - DNA, 33 bp, Homo sapien
gattgtctccatgaaaattgtctagtaaagatt

SEQ ID NO: 1071016 - DNA, 33 bp, Homo sapien
gattgtctccatgaaagttgtctagtaaagatt

SEQ ID NO: 1071017 - DNA, 33 bp, Homo sapien
taaaatgaaataacacaaaccgtgatttccaaa

SEQ ID NO: 1071018 - DNA, 33 bp, Homo sapien
taaaatgaaataacacgaaccgtgatttccaaa

SEQ ID NO: 1071019 - DNA, 33 bp, Homo sapien
aatagtccagcacttacctttggaaatcacggt

SEQ ID NO: 1071020 - DNA, 33 bp, Homo sapien
aatagtccagcacttagctttggaaatcacggt

SEQ ID NO: 1071021 - DNA, 33 bp, Homo sapien
ctttgtagtaacccgaactttctatctcgctga

SEQ ID NO: 1071022 - DNA, 33 bp, Homo sapien
ctttgtagtaacccgacctttctatctcgctga

SEQ ID NO: 1071023 - DNA, 33 bp, Homo sapien
agatacgcattattgagtagtacataagttatt

SEQ ID NO: 1071024 - DNA, 33 bp, Homo sapien
agatacgcattattgattagtacataagttatt

SEQ ID NO: 1071025 - DNA, 33 bp, Homo sapien
actaacaaattccaacaggtgaatcctgccaac

SEQ ID NO: 1071026 - DNA, 33 bp, Homo sapien
actaacaaattccaacgggtgaatcctgccaac

SEQ ID NO: 1071027 - DNA, 33 bp, Homo sapien
ctgaggcttacagaaactagacattttaaatag

SEQ ID NO: 1071028 - DNA, 33 bp, Homo sapien
ctgaggcttacagaaattagacattttaaatag

SEQ ID NO: 1071029 - DNA, 33 bp, Homo sapien
ttttattgatgaggaaatatttttgggtgatag

SEQ ID NO: 1071030 - DNA, 33 bp, Homo sapien
ttttattgatgaggaactatttttgggtgatag

SEQ ID NO: 1071031 - DNA, 33 bp, Homo sapien
tttgccctttgagggactacacacaaagaagca

SEQ ID NO: 1071032 - DNA, 33 bp, Homo sapien
tttgccctttgagggattacacacaaagaagca

SEQ ID NO: 1071033 - DNA, 33 bp, Homo sapien
ctttcatgtcccttcaaataaatatcataccac

SEQ ID NO: 1071034 - DNA, 33 bp, Homo sapien
ctttcatgtcccttcagataaatatcataccac

SEQ ID NO: 1071035 - DNA, 33 bp, Homo sapien
ttcttgtctattatgaacccagacagctgttcc

SEQ ID NO: 1071036 - DNA, 33 bp, Homo sapien
ttcttgtctattatgatcccagacagctgttcc

SEQ ID NO: 1071037 - DNA, 33 bp, Homo sapien
ctctaggtaacttaaacggcagcaatacaggtc

SEQ ID NO: 1071038 - DNA, 33 bp, Homo sapien
ctctaggtaacttaaatggcagcaatacaggtc

SEQ ID NO: 1071039 - DNA, 33 bp, Homo sapien
ttttttagatcagaagaccataatgcaggaggc

SEQ ID NO: 1071040 - DNA, 33 bp, Homo sapien
ttttttagatcagaagtccataatgcaggaggc

SEQ ID NO: 1071041 - DNA, 33 bp, Homo sapien
catcagtcacttaatagctttcttgattatcac

SEQ ID NO: 1071042 - DNA, 33 bp, Homo sapien
catcagtcacttaatatctttcttgattatcac

SEQ ID NO: 1071043 - DNA, 33 bp, Homo sapien
aatgaaaatgttcaacggagacactcaaacttc

SEQ ID NO: 1071044 - DNA, 33 bp, Homo sapien
aatgaaaatgttcaactgagacactcaaacttc

SEQ ID NO: 1071045 - DNA, 33 bp, Homo sapien
attccttctctctatacctggacgagctgagtt

SEQ ID NO: 1071046 - DNA, 33 bp, Homo sapien
attccttctctctatagctggacgagctgagtt

SEQ ID NO: 1071047 - DNA, 33 bp, Homo sapien
acctaacctattacccaactggattcacattca

SEQ ID NO: 1071048 - DNA, 33 bp, Homo sapien
acctaacctattacccgactggattcacattca

SEQ ID NO: 1071049 - DNA, 33 bp, Homo sapien
aatatctttcattttacggactatagtgcagac

SEQ ID NO: 1071050 - DNA, 33 bp, Homo sapien
aatatctttcattttatggactatagtgcagac

SEQ ID NO: 1071051 - DNA, 33 bp, Homo sapien
cattactgccatgaaaacaccttactgtgagct

SEQ ID NO: 1071052 - DNA, 33 bp, Homo sapien
cattactgccatgaaagcaccttactgtgagct

SEQ ID NO: 1071053 - DNA, 33 bp, Homo sapien
gttaaaaacatttgcaatcatagtgacccgaga

SEQ ID NO: 1071054 - DNA, 33 bp, Homo sapien
gttaaaaacatttgcagtcatagtgacccgaga

SEQ ID NO: 1071055 - DNA, 33 bp, Homo sapien
gctgaggctctgcaggcaagaaaggaaaaccca

SEQ ID NO: 1071056 - DNA, 33 bp, Homo sapien
gctgaggctctgcaggtaagaaaggaaaaccca

SEQ ID NO: 1071057 - DNA, 33 bp, Homo sapien
aattcaagtatcgagcacacttcagtggaaagg

SEQ ID NO: 1071058 - DNA, 33 bp, Homo sapien
aattcaagtatcgagcgcacttcagtggaaagg

SEQ ID NO: 1071059 - DNA, 33 bp, Homo sapien
acccaatactggacaagttatgaaagaaagagg

SEQ ID NO: 1071060 - DNA, 33 bp, Homo sapien
acccaatactggacaatttatgaaagaaagagg

SEQ ID NO: 1071061 - DNA, 33 bp, Homo sapien
tcttctgcctatggctaaccaattatgccagcg

SEQ ID NO: 1071062 - DNA, 33 bp, Homo sapien
tcttctgcctatggctgaccaattatgccagcg

SEQ ID NO: 1071063 - DNA, 33 bp, Homo sapien
tcctcacaatcaactgaaggtatttatcaagat

SEQ ID NO: 1071064 - DNA, 33 bp, Homo sapien
tcctcacaatcaactgtaggtatttatcaagat

SEQ ID NO: 1071065 - DNA, 33 bp, Homo sapien
tatatctacatattgacagcaggaaacataaca

SEQ ID NO: 1071066 - DNA, 33 bp, Homo sapien
tatatctacatattgatagcaggaaacataaca

SEQ ID NO: 1071067 - DNA, 33 bp, Homo sapien
gtggtcaaagccaaccagggaacaatacgaata

SEQ ID NO: 1071068 - DNA, 33 bp, Homo sapien
gtggtcaaagccaaccggggaacaatacgaata

SEQ ID NO: 1071069 - DNA, 33 bp, Homo sapien
gtcttccagctttgccccaaatgcatgatgatc

SEQ ID NO: 1071070 - DNA, 33 bp, Homo sapien
gtcttccagctttgcctcaaatgcatgatgatc

SEQ ID NO: 1071071 - DNA, 33 bp, Homo sapien
agaaggaaagaggttacgatttataaagagcca

SEQ ID NO: 1071072 - DNA, 33 bp, Homo sapien
agaaggaaagaggttatgatttataaagagcca

SEQ ID NO: 1071073 - DNA, 33 bp, Homo sapien
atcctgcttcagtaccactatgaacatggattc

SEQ ID NO: 1071074 - DNA, 33 bp, Homo sapien
atcctgcttcagtaccgctatgaacatggattc

SEQ ID NO: 1071075 - DNA, 33 bp, Homo sapien
gtttattaaagttcaaacctaaatttcatgatt

SEQ ID NO: 1071076 - DNA, 33 bp, Homo sapien
gtttattaaagttcaaccctaaatttcatgatt

SEQ ID NO: 1071077 - DNA, 33 bp, Homo sapien
tgctgtacgcatccagacatggtactagaaggc

SEQ ID NO: 1071078 - DNA, 33 bp, Homo sapien
tgctgtacgcatccaggcatggtactagaaggc

SEQ ID NO: 1071079 - DNA, 33 bp, Homo sapien
gcttcattatgcaggacatttactaagaagtga

SEQ ID NO: 1071080 - DNA, 33 bp, Homo sapien
gcttcattatgcaggatatttactaagaagtga

SEQ ID NO: 1071081 - DNA, 33 bp, Homo sapien
tgagtatttctgtcaaagaatgtgtgatttcta

SEQ ID NO: 1071082 - DNA, 33 bp, Homo sapien
tgagtatttctgtcaaggaatgtgtgatttcta

SEQ ID NO: 1071083 - DNA, 33 bp, Homo sapien
atcatccttcctctaccgactttttttcatggc

SEQ ID NO: 1071084 - DNA, 33 bp, Homo sapien
atcatccttcctctactgactttttttcatggc

SEQ ID NO: 1071085 - DNA, 33 bp, Homo sapien
gagaaagataaaggccagaagaattcagcaagt

SEQ ID NO: 1071086 - DNA, 33 bp, Homo sapien
gagaaagataaaggccggaagaattcagcaagt

SEQ ID NO: 1071087 - DNA, 33 bp, Homo sapien; identical to SEQ ID NO: 1071085

SEQ ID NO: 1071088 - DNA, 33 bp, Homo sapien; identical to SEQ ID NO: 1071086

SEQ ID NO: 1071089 - DNA, 33 bp, Homo sapien
gagtaaatattacagcaaagcaaggctcgaata

SEQ ID NO: 1071090 - DNA, 33 bp, Homo sapien
gagtaaatattacagcgaagcaaggctcgaata

SEQ ID NO: 1071091 - DNA, 33 bp, Homo sapien
aactagccagaaccagaccattgtgaatagaat

SEQ ID NO: 1071092 - DNA, 33 bp, Homo sapien
aactagccagaaccagtccattgtgaatagaat

SEQ ID NO: 1071093 - DNA, 33 bp, Homo sapien
cctcagactccaaagagggacgcccagatacac

SEQ ID NO: 1071094 - DNA, 33 bp, Homo sapien
cctcagactccaaagatggacgcccagatacac

SEQ ID NO: 1071095 - DNA, 33 bp, Homo sapien
ggctgttgctatcaacaggattccagaatgagg

SEQ ID NO: 1071096 - DNA, 33 bp, Homo sapien
ggctgttgctatcaacgggattccagaatgagg

SEQ ID NO: 1071097 - DNA, 33 bp, Homo sapien
gtagctgtgcaagtacacttattgcaaaaaatt

SEQ ID NO: 1071098 - DNA, 33 bp, Homo sapien
gtagctgtgcaagtacgcttattgcaaaaaatt

SEQ ID NO: 1071099 - DNA, 33 bp, Homo sapien
agcctagattcagcttcaaaataatacacatca

SEQ ID NO: 1071100 - DNA, 33 bp, Homo sapien
agcctagattcagctttaaaataatacacatca

SEQ ID NO: 1071101 - DNA, 33 bp, Homo sapien
cctaagctagtgagggacattggaaggatctaa

SEQ ID NO: 1071102 - DNA, 33 bp, Homo sapien
cctaagctagtgaggggcattggaaggatctaa

SEQ ID NO: 1071103 - DNA, 33 bp, Homo sapien
ggtgactgatgaccagcaagataacaagcagaa

SEQ ID NO: 1071104 - DNA, 33 bp, Homo sapien
ggtgactgatgaccagtaagataacaagcagaa

SEQ ID NO: 1071105 - DNA, 33 bp, Homo sapien
tatgactgctggcctacgttgccaccagatgct

SEQ ID NO: 1071106 - DNA, 33 bp, Homo sapien
tatgactgctggcctatgttgccaccagatgct

SEQ ID NO: 1071107 - DNA, 33 bp, Homo sapien
aaatgaaaaagacaaagcattaaattcagactg

SEQ ID NO: 1071108 - DNA, 33 bp, Homo sapien
aaatgaaaaagacaaatcattaaattcagactg

SEQ ID NO: 1071109 - DNA, 33 bp, Homo sapien
tatctgtgaatttggaaagagaatctttgcaga

SEQ ID NO: 1071110 - DNA, 33 bp, Homo sapien
tatctgtgaatttggagagagaatctttgcaga

SEQ ID NO: 1071111 - DNA, 33 bp, Homo sapien
gtggggcaaaatgaagcaagaatgacttcaagg

SEQ ID NO: 1071112 - DNA, 33 bp, Homo sapien
gtggggcaaaatgaaggaagaatgacttcaagg

SEQ ID NO: 1071113 - DNA, 33 bp, Homo sapien
gtgctttctatacagcaaactctgggaagacct

SEQ ID NO: 1071114 - DNA, 33 bp, Homo sapien
gtgctttctatacagcgaactctgggaagacct

SEQ ID NO: 1071115 - DNA, 33 bp, Homo sapien
tctgtgattctgaatccatatctgagtttctaa

SEQ ID NO: 1071116 - DNA, 33 bp, Homo sapien
tctgtgattctgaatcgatatctgagtttctaa

SEQ ID NO: 1071117 - DNA, 33 bp, Homo sapien
tttgtgctggattttcaattttcgtcacttgcc

SEQ ID NO: 1071118 - DNA, 33 bp, Homo sapien
tttgtgctggattttcgattttcgtcacttgcc

SEQ ID NO: 1071119 - DNA, 33 bp, Homo sapien
ttgtaatctttaaacactgttactctttagagg

SEQ ID NO: 1071120 - DNA, 33 bp, Homo sapien
ttgtaatctttaaacagtgttactctttagagg

SEQ ID NO: 1071121 - DNA, 33 bp, Homo sapien
atacatgagagagacacagcgaaacacagaaat

SEQ ID NO: 1071122 - DNA, 33 bp, Homo sapien
atacatgagagagacagagcgaaacacagaaat

SEQ ID NO: 1071123 - DNA, 33 bp, Homo sapien
atgtgattcatgaataaatgatgcaacttataa

SEQ ID NO: 1071124 - DNA, 33 bp, Homo sapien
atgtgattcatgaatagatgatgcaacttataa

SEQ ID NO: 1071125 - DNA, 33 bp, Homo sapien
agttctggttccagaaagaaagtggtttgtgta

SEQ ID NO: 1071126 - DNA, 33 bp, Homo sapien
agttctggttccagaacgaaagtggtttgtgta

SEQ ID NO: 1071127 - DNA, 33 bp, Homo sapien
gaactttgagaacacacggtgctttaatcagag

SEQ ID NO: 1071128 - DNA, 33 bp, Homo sapien
gaactttgagaacacatggtgctttaatcagag

SEQ ID NO: 1071129 - DNA, 33 bp, Homo sapien
ctaccttcttctatgcaccaaaagttttggata

SEQ ID NO: 1071130 - DNA, 33 bp, Homo sapien
ctaccttcttctatgcgccaaaagttttggata

SEQ ID NO: 1071131 - DNA, 33 bp, Homo sapien
aatgctaaatgaacaacaggagaatctgacttt

SEQ ID NO: 1071132 - DNA, 33 bp, Homo sapien
aatgctaaatgaacaataggagaatctgacttt

SEQ ID NO: 1071133 - DNA, 33 bp, Homo sapien
caaggcttcctactaacaagattcacactcaca

SEQ ID NO: 1071134 - DNA, 33 bp, Homo sapien
caaggcttcctactaataagattcacactcaca

SEQ ID NO: 1071135 - DNA, 33 bp, Homo sapien
actctttgatttgaccaacacaatgcagatgga

SEQ ID NO: 1071136 - DNA, 33 bp, Homo sapien
actctttgatttgaccgacacaatgcagatgga

SEQ ID NO: 1071137 - DNA, 33 bp, Homo sapien
ctcaaaattccagttaagactgtgtattagtaa

SEQ ID NO: 1071138 - DNA, 33 bp, Homo sapien
ctcaaaattccagttaggactgtgtattagtaa

SEQ ID NO: 1071139 - DNA, 33 bp, Homo sapien
ttatcaaggagtgtgcaaaatatatgtaaatgt

SEQ ID NO: 1071140 - DNA, 33 bp, Homo sapien
ttatcaaggagtgtgcgaaatatatgtaaatgt

SEQ ID NO: 1071141 - DNA, 33 bp, Homo sapien
aacggtgcattgtttacgaactctggcacaaac

SEQ ID NO: 1071142 - DNA, 33 bp, Homo sapien
aacggtgcattgtttaggaactctggcacaaac

SEQ ID NO: 1071143 - DNA, 33 bp, Homo sapien
ccttccagataacacaatgagagtcaggtatgg

SEQ ID NO: 1071144 - DNA, 33 bp, Homo sapien
ccttccagataacacagtgagagtcaggtatgg

SEQ ID NO: 1071145 - DNA, 33 bp, Homo sapien
gctaatacttgttaaacagcccattttcccctc

SEQ ID NO: 1071146 - DNA, 33 bp, Homo sapien
gctaatacttgttaaagagcccattttcccctc

SEQ ID NO: 1071147 - DNA, 33 bp, Homo sapien
aacaatgcctggaatcaatatgtaaataatctt

SEQ ID NO: 1071148 - DNA, 33 bp, Homo sapien
aacaatgcctggaatcgatatgtaaataatctt

SEQ ID NO: 1071149 - DNA, 33 bp, Homo sapien
atgcatttttaaatagaagagcaaatatgcctc

SEQ ID NO: 1071150 - DNA, 33 bp, Homo sapien
atgcatttttaaataggagagcaaatatgcctc

SEQ ID NO: 1071151 - DNA, 33 bp, Homo sapien
cttttttcttccttgacaatttatgacttgaac

SEQ ID NO: 1071152 - DNA, 33 bp, Homo sapien
cttttttcttccttgataatttatgacttgaac

SEQ ID NO: 1071153 - DNA, 33 bp, Homo sapien
agctagatcagatagacaatggtggtttcttcc

SEQ ID NO: 1071154 - DNA, 33 bp, Homo sapien
agctagatcagatagagaatggtggtttcttcc

SEQ ID NO: 1071155 - DNA, 33 bp, Homo sapien
aaaatgtcatgctagcacaaagttgggaaacaa

SEQ ID NO: 1071156 - DNA, 33 bp, Homo sapien
aaaatgtcatgctagcgcaaagttgggaaacaa

SEQ ID NO: 1071157 - DNA, 33 bp, Homo sapien
atagatgtgaggaatacgcagtctccactttga

SEQ ID NO: 1071158 - DNA, 33 bp, Homo sapien
atagatgtgaggaatatgcagtctccactttga

SEQ ID NO: 1071159 - DNA, 33 bp, Homo sapien
acctttatctacctcacactttccctcattttt

SEQ ID NO: 1071160 - DNA, 33 bp, Homo sapien
acctttatctacctcatactttccctcattttt

SEQ ID NO: 1071161 - DNA, 33 bp, Homo sapien
tcagtgaccctttatcaaatgtggggatgaaag

SEQ ID NO: 1071162 - DNA, 33 bp, Homo sapien
tcagtgaccctttatcgaatgtggggatgaaag

SEQ ID NO: 1071163 - DNA, 33 bp, Homo sapien
tatccagataccacacaggctttcaatggcaga

SEQ ID NO: 1071164 - DNA, 33 bp, Homo sapien
tatccagataccacactggctttcaatggcaga

SEQ ID NO: 1071165 - DNA, 33 bp, Homo sapien
gtcagaatgtgcctcaatatcaatgagacatga

SEQ ID NO: 1071166 - DNA, 33 bp, Homo sapien
gtcagaatgtgcctcagtatcaatgagacatga

SEQ ID NO: 1071167 - DNA, 33 bp, Homo sapien
ggccaaattgctccagacctccaacatatccaa

SEQ ID NO: 1071168 - DNA, 33 bp, Homo sapien
ggccaaattgctccaggcctccaacatatccaa

SEQ ID NO: 1071169 - DNA, 33 bp, Homo sapien
actggtagggaagacaaatacatgaacttagtc

SEQ ID NO: 1071170 - DNA, 33 bp, Homo sapien
actggtagggaagacagatacatgaacttagtc

SEQ ID NO: 1071171 - DNA, 33 bp, Homo sapien
atacttgaagaacacaatatacaaggagtcggc

SEQ ID NO: 1071172 - DNA, 33 bp, Homo sapien
atacttgaagaacacagtatacaaggagtcggc

SEQ ID NO: 1071173 - DNA, 33 bp, Homo sapien
cagtaaaatagtacaaatatccagttcccagtt

SEQ ID NO: 1071174 - DNA, 33 bp, Homo sapien
cagtaaaatagtacaactatccagttcccagtt

SEQ ID NO: 1071175 - DNA, 33 bp, Homo sapien
cttcttcacctctgtaccaatgctgtagcagaa

SEQ ID NO: 1071176 - DNA, 33 bp, Homo sapien
cttcttcacctctgtagcaatgctgtagcagaa

SEQ ID NO: 1071177 - DNA, 33 bp, Homo sapien
atatatgtttagcagacagatatgggaggaaag

SEQ ID NO: 1071178 - DNA, 33 bp, Homo sapien
atatatgtttagcagatagatatgggaggaaag

SEQ ID NO: 1071179 - DNA, 33 bp, Homo sapien
caaacagaaccattgaaatagagatgacccatt

SEQ ID NO: 1071180 - DNA, 33 bp, Homo sapien
caaacagaaccattgacatagagatgacccatt

SEQ ID NO: 1071181 - DNA, 33 bp, Homo sapien
tgtccacagaagtgaaacctgaagggatgtggc

SEQ ID NO: 1071182 - DNA, 33 bp, Homo sapien
tgtccacagaagtgaatcctgaagggatgtggc

SEQ ID NO: 1071183 - DNA, 33 bp, Homo sapien
cagacatcaaacagtacgtaattccagctgtct

SEQ ID NO: 1071184 - DNA, 33 bp, Homo sapien
cagacatcaaacagtatgtaattccagctgtct

SEQ ID NO: 1071185 - DNA, 33 bp, Homo sapien
gccccttgtgaccacccgaaacaaggctcacat

SEQ ID NO: 1071186 - DNA, 33 bp, Homo sapien
gccccttgtgaccaccggaaacaaggctcacat

SEQ ID NO: 1071187 - DNA, 33 bp, Homo sapien
ttcatgttgtctttaccatgaggacttgattag

SEQ ID NO: 1071188 - DNA, 33 bp, Homo sapien
ttcatgttgtctttactatgaggacttgattag

SEQ ID NO: 1071189 - DNA, 33 bp, Homo sapien
ctctattttttgctcaatcttccagtcttatca

SEQ ID NO: 1071190 - DNA, 33 bp, Homo sapien
ctctattttttgctcagtcttccagtcttatca

SEQ ID NO: 1071191 - DNA, 33 bp, Homo sapien
cacccacaagcaaaagacatttaattctagact

SEQ ID NO: 1071192 - DNA, 33 bp, Homo sapien
cacccacaagcaaaaggcatttaattctagact

SEQ ID NO: 1071193 - DNA, 33 bp, Homo sapien
cattcctgaccttaacaaccttctcccaacctt

SEQ ID NO: 1071194 - DNA, 33 bp, Homo sapien
cattcctgaccttaacgaccttctcccaacctt

SEQ ID NO: 1071195 - DNA, 33 bp, Homo sapien
gagaaactttaatacacatgatttagtggcaga

SEQ ID NO: 1071196 - DNA, 33 bp, Homo sapien
gagaaactttaatacatatgatttagtggcaga

SEQ ID NO: 1071197 - DNA, 33 bp, Homo sapien
aatgatagagataaaactcaaacccaaatagac

SEQ ID NO: 1071198 - DNA, 33 bp, Homo sapien
aatgatagagataaaattcaaacccaaatagac

SEQ ID NO: 1071199 - DNA, 33 bp, Homo sapien
tgtcggctaccacttacagatgagtaaaatata

SEQ ID NO: 1071200 - DNA, 33 bp, Homo sapien
tgtcggctaccacttatagatgagtaaaatata

SEQ ID NO: 1071201 - DNA, 33 bp, Homo sapien
gttctcactgcctctgaacccatttctattgtc

SEQ ID NO: 1071202 - DNA, 33 bp, Homo sapien
gttctcactgcctctggacccatttctattgtc

SEQ ID NO: 1071203 - DNA, 33 bp, Homo sapien
gataagggaacctgaacagtgaatacgtccagt

SEQ ID NO: 1071204 - DNA, 33 bp, Homo sapien
gataagggaacctgaagagtgaatacgtccagt

SEQ ID NO: 1071205 - DNA, 33 bp, Homo sapien
tggagatgggaagatcaaacttcttacaaaatt

SEQ ID NO: 1071206 - DNA, 33 bp, Homo sapien
tggagatgggaagatccaacttcttacaaaatt

SEQ ID NO: 1071207 - DNA, 33 bp, Homo sapien
ctgacgggtcttcctactacattactgctgtct

SEQ ID NO: 1071208 - DNA, 33 bp, Homo sapien
ctgacgggtcttcctattacattactgctgtct

SEQ ID NO: 1071209 - DNA, 33 bp, Homo sapien
tcatctttgctggggaccaccaagcaggtaaat

SEQ ID NO: 1071210 - DNA, 33 bp, Homo sapien
tcatctttgctggggatcaccaagcaggtaaat

SEQ ID NO: 1071211 - DNA, 33 bp, Homo sapien
acaaacatgctccagaagtttgtatggtaaatc

SEQ ID NO: 1071212 - DNA, 33 bp, Homo sapien
acaaacatgctccagacgtttgtatggtaaatc

SEQ ID NO: 1071213 - DNA, 33 bp, Homo sapien
aagacagctccaaaaactttaacagcagccaat

SEQ ID NO: 1071214 - DNA, 33 bp, Homo sapien
aagacagctccaaaaagtttaacagcagccaat

SEQ ID NO: 1071215 - DNA, 33 bp, Homo sapien
ttttagagaaggacgccataatcattcagtgag

SEQ ID NO: 1071216 - DNA, 33 bp, Homo sapien
ttttagagaaggacgctataatcattcagtgag

SEQ ID NO: 1071217 - DNA, 33 bp, Homo sapien
gtttgaaaggcacttggaatatgtcaataattc

SEQ ID NO: 1071218 - DNA, 33 bp, Homo sapien
gtttgaaaggcacttgtaatatgtcaataattc

SEQ ID NO: 1071219 - DNA, 33 bp, Homo sapien
ttcaaatgattttgaaatgaggcaatagataga

SEQ ID NO: 1071220 - DNA, 33 bp, Homo sapien
ttcaaatgattttgaagtgaggcaatagataga

SEQ ID NO: 1071221 - DNA, 33 bp, Homo sapien
actaggtatacacctgaagaaatataaattatc

SEQ ID NO: 1071222 - DNA, 33 bp, Homo sapien
actaggtatacacctggagaaatataaattatc

SEQ ID NO: 1071223 - DNA, 33 bp, Homo sapien
taccctttactgtggccattatcaaaaaaacaa

SEQ ID NO: 1071224 - DNA, 33 bp, Homo sapien
taccctttactgtggctattatcaaaaaaacaa

SEQ ID NO: 1071225 - DNA, 33 bp, Homo sapien
tgactttggacaagtcgcttaagcttcacaact

SEQ ID NO: 1071226 - DNA, 33 bp, Homo sapien
tgactttggacaagtctcttaagcttcacaact

SEQ ID NO: 1071227 - DNA, 33 bp, Homo sapien
ctttgcaggacaaacaccatcctccctctagct

SEQ ID NO: 1071228 - DNA, 33 bp, Homo sapien
ctttgcaggacaaacatcatcctccctctagct

SEQ ID NO: 1071229 - DNA, 33 bp, Homo sapien
caaatgagataatggaggtaacagtagcttgtt

SEQ ID NO: 1071230 - DNA, 33 bp, Homo sapien
caaatgagataatggatgtaacagtagcttgtt

SEQ ID NO: 1071231 - DNA, 33 bp, Homo sapien
ctctgagtaggtcaaaagtaaacatgcagtgcc

SEQ ID NO: 1071232 - DNA, 33 bp, Homo sapien
ctctgagtaggtcaaacgtaaacatgcagtgcc

SEQ ID NO: 1071233 - DNA, 33 bp, Homo sapien
tgcctaagttagacaaacctaccctagagatac

SEQ ID NO: 1071234 - DNA, 33 bp, Homo sapien
tgcctaagttagacaaccctaccctagagatac

SEQ ID NO: 1071235 - DNA, 33 bp, Homo sapien
ctttggcctttggatgaataccctttgaaatct

SEQ ID NO: 1071236 - DNA, 33 bp, Homo sapien
ctttggcctttggatgtataccctttgaaatct

SEQ ID NO: 1071237 - DNA, 33 bp, Homo sapien
gtgtttaagtttagaacgtcctgagaataacag

SEQ ID NO: 1071238 - DNA, 33 bp, Homo sapien
gtgtttaagtttagaatgtcctgagaataacag

SEQ ID NO: 1071239 - DNA, 33 bp, Homo sapien
atcagtgctcttaaaacaatgagttatggcatg

SEQ ID NO: 1071240 - DNA, 33 bp, Homo sapien
atcagtgctcttaaaataatgagttatggcatg

SEQ ID NO: 1071241 - DNA, 33 bp, Homo sapien
gtttgccctggagatgcagatgcctagtgaact

SEQ ID NO: 1071242 - DNA, 33 bp, Homo sapien
gtttgccctggagatgtagatgcctagtgaact

SEQ ID NO: 1071243 - DNA, 33 bp, Homo sapien
tactcttctgcacccaccgtcagttcactaggc

SEQ ID NO: 1071244 - DNA, 33 bp, Homo sapien
tactcttctgcacccatcgtcagttcactaggc

SEQ ID NO: 1071245 - DNA, 33 bp, Homo sapien
ggctctgattttgttaagaatggtagaatatgt

SEQ ID NO: 1071246 - DNA, 33 bp, Homo sapien
ggctctgattttgttaggaatggtagaatatgt

SEQ ID NO: 1071247 - DNA, 33 bp, Homo sapien
agagcccactcccagaaatttttattcagtaac

SEQ ID NO: 1071248 - DNA, 33 bp, Homo sapien
agagcccactcccagagatttttattcagtaac

SEQ ID NO: 1071249 - DNA, 33 bp, Homo sapien
ctgattggactacaaacgattgttcaaaatgcc

SEQ ID NO: 1071250 - DNA, 33 bp, Homo sapien
ctgattggactacaaatgattgttcaaaatgcc

SEQ ID NO: 1071251 - DNA, 33 bp, Homo sapien
atttcaggcagaaagaatagcacctgcaaagtc

SEQ ID NO: 1071252 - DNA, 33 bp, Homo sapien
atttcaggcagaaagagtagcacctgcaaagtc

SEQ ID NO: 1071253 - DNA, 33 bp, Homo sapien
aagctggagcatcgtcaaggaagcttgcatgaa

SEQ ID NO: 1071254 - DNA, 33 bp, Homo sapien
aagctggagcatcgtcgaggaagcttgcatgaa

SEQ ID NO: 1071255 - DNA, 33 bp, Homo sapien
ttaagcaatttctctacgctcatactgctaaga

SEQ ID NO: 1071256 - DNA, 33 bp, Homo sapien
ttaagcaatttctctatgctcatactgctaaga

SEQ ID NO: 1071257 - DNA, 33 bp, Homo sapien
taaactaaggcatagaactgttaagcaatttct

SEQ ID NO: 1071258 - DNA, 33 bp, Homo sapien
taaactaaggcatagagctgttaagcaatttct

SEQ ID NO: 1071259 - DNA, 33 bp, Homo sapien
tgtctctgtctaaaacaatagtctgcataaagt

SEQ ID NO: 1071260 - DNA, 33 bp, Homo sapien
tgtctctgtctaaaacgatagtctgcataaagt

SEQ ID NO: 1071261 - DNA, 33 bp, Homo sapien
ttgcacagcccacagaaccatgagctaaataaa

SEQ ID NO: 1071262 - DNA, 33 bp, Homo sapien
ttgcacagcccacagatccatgagctaaataaa

SEQ ID NO: 1071263 - DNA, 33 bp, Homo sapien
tgactcacatactactcaatgcaagtggctcca

SEQ ID NO: 1071264 - DNA, 33 bp, Homo sapien
tgactcacatactactgaatgcaagtggctcca

SEQ ID NO: 1071265 - DNA, 33 bp, Homo sapien
gcactggtgaaacaccaatgaggaagagtctct

SEQ ID NO: 1071266 - DNA, 33 bp, Homo sapien
gcactggtgaaacaccgatgaggaagagtctct

SEQ ID NO: 1071267 - DNA, 33 bp, Homo sapien
aagtaatgtaactaaaatccattaaaaggcctt

SEQ ID NO: 1071268 - DNA, 33 bp, Homo sapien
aagtaatgtaactaaagtccattaaaaggcctt

SEQ ID NO: 1071269 - DNA, 33 bp, Homo sapien
gataaagtggaagaagaatcacaaagcacaaag

SEQ ID NO: 1071270 - DNA, 33 bp, Homo sapien
gataaagtggaagaagtatcacaaagcacaaag

SEQ ID NO: 1071271 - DNA, 33 bp, Homo sapien
gacaatgaaatgatgaagagaaacataagaacc

SEQ ID NO: 1071272 - DNA, 33 bp, Homo sapien
gacaatgaaatgatgaggagaaacataagaacc

SEQ ID NO: 1071273 - DNA, 33 bp, Homo sapien
aaaagagtaccatataggaatgtttgctattat

SEQ ID NO: 1071274 - DNA, 33 bp, Homo sapien
aaaagagtaccatatatgaatgtttgctattat

SEQ ID NO: 1071275 - DNA, 33 bp, Homo sapien
gagtaagatacaaaaaggtgtgagtaacatgac

SEQ ID NO: 1071276 - DNA, 33 bp, Homo sapien
gagtaagatacaaaaatgtgtgagtaacatgac

SEQ ID NO: 1071277 - DNA, 33 bp, Homo sapien
gcaagtgaccgtgggcactaataacaacagggc

SEQ ID NO: 1071278 - DNA, 33 bp, Homo sapien
gcaagtgaccgtgggcgctaataacaacagggc

SEQ ID NO: 1071279 - DNA, 33 bp, Homo sapien
tgaatttcttcatcaaccctccttcagcctcct

SEQ ID NO: 1071280 - DNA, 33 bp, Homo sapien
tgaatttcttcatcaatcctccttcagcctcct

SEQ ID NO: 1071281 - DNA, 33 bp, Homo sapien
cttatgaggcaaccaacgttttggactacatag

SEQ ID NO: 1071282 - DNA, 33 bp, Homo sapien
cttatgaggcaaccaatgttttggactacatag

SEQ ID NO: 1071283 - DNA, 33 bp, Homo sapien
gctggaatctggacaaggatgatcaagggaaag

SEQ ID NO: 1071284 - DNA, 33 bp, Homo sapien
gctggaatctggacaatgatgatcaagggaaag

SEQ ID NO: 1071285 - DNA, 33 bp, Homo sapien
caactggttgtttaagacccatctcagaggcca

SEQ ID NO: 1071286 - DNA, 33 bp, Homo sapien
caactggttgtttaaggcccatctcagaggcca

SEQ ID NO: 1071287 - DNA, 33 bp, Homo sapien
tctgtcctccaggcacgcttgtcttggtaaaaa

SEQ ID NO: 1071288 - DNA, 33 bp, Homo sapien
tctgtcctccaggcactcttgtcttggtaaaaa

SEQ ID NO: 1071289 - DNA, 33 bp, Homo sapien
ctccacattctctataaacaattcagtggattt

SEQ ID NO: 1071290 - DNA, 33 bp, Homo sapien
ctccacattctctatacacaattcagtggattt

SEQ ID NO: 1071291 - DNA, 33 bp, Homo sapien
agttttgctgtcttgacgatattctttcagttc

SEQ ID NO: 1071292 - DNA, 33 bp, Homo sapien
agttttgctgtcttgatgatattctttcagttc

SEQ ID NO: 1071293 - DNA, 33 bp, Homo sapien
gtggaatatgcagaaacagagctggctaatgca

SEQ ID NO: 1071294 - DNA, 33 bp, Homo sapien
gtggaatatgcagaaagagagctggctaatgca

SEQ ID NO: 1071295 - DNA, 33 bp, Homo sapien
ctcatctgaaatgctacccttgacatacatctg

SEQ ID NO: 1071296 - DNA, 33 bp, Homo sapien
ctcatctgaaatgctatccttgacatacatctg

SEQ ID NO: 1071297 - DNA, 33 bp, Homo sapien
ggctaaatttctcagcactctatactagttcat

SEQ ID NO: 1071298 - DNA, 33 bp, Homo sapien
ggctaaatttctcagctctctatactagttcat

SEQ ID NO: 1071299 - DNA, 33 bp, Homo sapien
tggctaaagtatttgaaattgaacaggactgac

SEQ ID NO: 1071300 - DNA, 33 bp, Homo sapien
tggctaaagtatttgacattgaacaggactgac

SEQ ID NO: 1071301 - DNA, 33 bp, Homo sapien
tactgagcatcaattaagtgacaggatcaagca

SEQ ID NO: 1071302 - DNA, 33 bp, Homo sapien
tactgagcatcaattatgtgacaggatcaagca

SEQ ID NO: 1071303 - DNA, 33 bp, Homo sapien
tccagatgaaggggcactctagcaacagaacta

SEQ ID NO: 1071304 - DNA, 33 bp, Homo sapien
tccagatgaaggggcagtctagcaacagaacta

SEQ ID NO: 1071305 - DNA, 33 bp, Homo sapien
gccactgcacccaaccaaggcatctttcttata

SEQ ID NO: 1071306 - DNA, 33 bp, Homo sapien
gccactgcacccaaccgaggcatctttcttata

SEQ ID NO: 1071307 - DNA, 33 bp, Homo sapien
ttaattaaactgaaaactttctgcagagcaaaa

SEQ ID NO: 1071308 - DNA, 33 bp, Homo sapien
ttaattaaactgaaaagtttctgcagagcaaaa

SEQ ID NO: 1071309 - DNA, 33 bp, Homo sapien
aattgaacttattgaactagacagtaaaatgat

SEQ ID NO: 1071310 - DNA, 33 bp, Homo sapien
aattgaacttattgaattagacagtaaaatgat

SEQ ID NO: 1071311 - DNA, 33 bp, Homo sapien
ttttgcctttgtttggaagaagagaggtaaaaa

SEQ ID NO: 1071312 - DNA, 33 bp, Homo sapien
ttttgcctttgtttgggagaagagaggtaaaaa

SEQ ID NO: 1071313 - DNA, 33 bp, Homo sapien
cacagaaatcataacaaaaagtcaagacataga

SEQ ID NO: 1071314 - DNA, 33 bp, Homo sapien
cacagaaatcataacagaaagtcaagacataga

SEQ ID NO: 1071315 - DNA, 33 bp, Homo sapien
agttaacctgtacctgaactgtcccacgaaaac

SEQ ID NO: 1071316 - DNA, 33 bp, Homo sapien
agttaacctgtacctggactgtcccacgaaaac

SEQ ID NO: 1071317 - DNA, 33 bp, Homo sapien
atggctaccatactccacctagtaacacttcag

SEQ ID NO: 1071318 - DNA, 33 bp, Homo sapien
atggctaccatactccgcctagtaacacttcag

SEQ ID NO: 1071319 - DNA, 33 bp, Homo sapien
atgttgggtctttcaaccaatgaatgtggtcta

SEQ ID NO: 1071320 - DNA, 33 bp, Homo sapien
atgttgggtctttcaatcaatgaatgtggtcta

SEQ ID NO: 1071321 - DNA, 33 bp, Homo sapien
tcatcattttttatacaaacatttttacactgt

SEQ ID NO: 1071322 - DNA, 33 bp, Homo sapien
tcatcattttttatacgaacatttttacactgt

SEQ ID NO: 1071323 - DNA, 33 bp, Homo sapien
aaccagcaaatcccaacaattttaagtcaagtt

SEQ ID NO: 1071324 - DNA, 33 bp, Homo sapien
aaccagcaaatcccaataattttaagtcaagtt

SEQ ID NO: 1071325 - DNA, 33 bp, Homo sapien
tctgtttcttacttcaggccaagacctacagtg

SEQ ID NO: 1071326 - DNA, 33 bp, Homo sapien
tctgtttcttacttcatgccaagacctacagtg

SEQ ID NO: 1071327 - DNA, 33 bp, Homo sapien
gtggtatgattgcaaacagaaagactgttcgat

SEQ ID NO: 1071328 - DNA, 33 bp, Homo sapien
gtggtatgattgcaaatagaaagactgttcgat

SEQ ID NO: 1071329 - DNA, 33 bp, Homo sapien
tgatcctattagttatcacaagcaaagcagctc

SEQ ID NO: 1071330 - DNA, 33 bp, Homo sapien
tgatcctattagttatgacaagcaaagcagctc

SEQ ID NO: 1071331 - DNA, 33 bp, Homo sapien
tcatgcttaatatccagtctcatacctgttctc

SEQ ID NO: 1071332 - DNA, 33 bp, Homo sapien
tcatgcttaatatccattctcatacctgttctc

SEQ ID NO: 1071333 - DNA, 33 bp, Homo sapien
gaaaagagacatatgccatcccaaaagaacata

SEQ ID NO: 1071334 - DNA, 33 bp, Homo sapien
gaaaagagacatatgctatcccaaaagaacata

SEQ ID NO: 1071335 - DNA, 33 bp, Homo sapien
gaaagaaagtcctgaaacaaacaggcttgagga

SEQ ID NO: 1071336 - DNA, 33 bp, Homo sapien
gaaagaaagtcctgaagcaaacaggcttgagga

SEQ ID NO: 1071337 - DNA, 33 bp, Homo sapien
agtttgtaaatagtgaagtaatgatctggcagt

SEQ ID NO: 1071338 - DNA, 33 bp, Homo sapien
agtttgtaaatagtgaggtaatgatctggcagt

SEQ ID NO: 1071339 - DNA, 33 bp, Homo sapien
tcctgtaatctttgaacaatcctataattgttg

SEQ ID NO: 1071340 - DNA, 33 bp, Homo sapien
tcctgtaatctttgaagaatcctataattgttg

SEQ ID NO: 1071341 - DNA, 33 bp, Homo sapien
ggttaccgtttgtgaacgatctcactaatggaa

SEQ ID NO: 1071342 - DNA, 33 bp, Homo sapien
ggttaccgtttgtgaatgatctcactaatggaa

SEQ ID NO: 1071343 - DNA, 33 bp, Homo sapien
gagccagttggtctcaagtaatgcctacaaaga

SEQ ID NO: 1071344 - DNA, 33 bp, Homo sapien
gagccagttggtctcaggtaatgcctacaaaga

SEQ ID NO: 1071345 - DNA, 33 bp, Homo sapien
ccttggccaacctaataaggaactctggaacaa

SEQ ID NO: 1071346 - DNA, 33 bp, Homo sapien
ccttggccaacctaatgaggaactctggaacaa

SEQ ID NO: 1071347 - DNA, 33 bp, Homo sapien
gggctactgtcaaacaacagcatagaacccaag

SEQ ID NO: 1071348 - DNA, 33 bp, Homo sapien
gggctactgtcaaacagcagcatagaacccaag

SEQ ID NO: 1071349 - DNA, 33 bp, Homo sapien
ttgccctgccaaggtgcattcagtttcctctgc

SEQ ID NO: 1071350 - DNA, 33 bp, Homo sapien
ttgccctgccaaggtgtattcagtttcctctgc

SEQ ID NO: 1071351 - DNA, 33 bp, Homo sapien
gtgaggccatagcacccagatattccaccgatg

SEQ ID NO: 1071352 - DNA, 33 bp, Homo sapien
gtgaggccatagcacctagatattccaccgatg

SEQ ID NO: 1071353 - DNA, 33 bp, Homo sapien
ttaacataagtttacaagacatatcaggttttt

SEQ ID NO: 1071354 - DNA, 33 bp, Homo sapien
ttaacataagtttacaggacatatcaggttttt

SEQ ID NO: 1071355 - DNA, 33 bp, Homo sapien
agagttcatcttttgcaataggatagacagcaa

SEQ ID NO: 1071356 - DNA, 33 bp, Homo sapien
agagttcatcttttgcgataggatagacagcaa

SEQ ID NO: 1071357 - DNA, 33 bp, Homo sapien
taagtttcccatgtcaaaactctttacaaggtc

SEQ ID NO: 1071358 - DNA, 33 bp, Homo sapien
taagtttcccatgtcagaactctttacaaggtc

SEQ ID NO: 1071359 - DNA, 33 bp, Homo sapien
atggattctttaccaggccctccctggcagtga

SEQ ID NO: 1071360 - DNA, 33 bp, Homo sapien
atggattctttaccagtccctccctggcagtga

SEQ ID NO: 1071361 - DNA, 33 bp, Homo sapien
gtgtaggcacttatggaaacctattgcagtagg

SEQ ID NO: 1071362 - DNA, 33 bp, Homo sapien
gtgtaggcacttatgggaacctattgcagtagg

SEQ ID NO: 1071363 - DNA, 33 bp, Homo sapien
agcagaggtcacttaaaagagagaccagtgagg

SEQ ID NO: 1071364 - DNA, 33 bp, Homo sapien
agcagaggtcacttaagagagagaccagtgagg

SEQ ID NO: 1071365 - DNA, 33 bp, Homo sapien
aggactagatgaattaaatttccatagagtaga

SEQ ID NO: 1071366 - DNA, 33 bp, Homo sapien
aggactagatgaattatatttccatagagtaga

SEQ ID NO: 1071367 - DNA, 33 bp, Homo sapien
taatgcaaggaaggggccatgagttggaaatac

SEQ ID NO: 1071368 - DNA, 33 bp, Homo sapien
taatgcaaggaaggggtcatgagttggaaatac

SEQ ID NO: 1071369 - DNA, 33 bp, Homo sapien
ttagctattaagagaaacctagagatgatttaa

SEQ ID NO: 1071370 - DNA, 33 bp, Homo sapien
ttagctattaagagaatcctagagatgatttaa

SEQ ID NO: 1071371 - DNA, 33 bp, Homo sapien
tgggactacttcctgactaactccaaaaaggaa

SEQ ID NO: 1071372 - DNA, 33 bp, Homo sapien
tgggactacttcctgattaactccaaaaaggaa

SEQ ID NO: 1071373 - DNA, 33 bp, Homo sapien
ccactttaggaactgacggcctaggcagggagc

SEQ ID NO: 1071374 - DNA, 33 bp, Homo sapien
ccactttaggaactgatggcctaggcagggagc

SEQ ID NO: 1071375 - DNA, 33 bp, Homo sapien
aagcagtttacgtgccaattcaatttcttaacc

SEQ ID NO: 1071376 - DNA, 33 bp, Homo sapien
aagcagtttacgtgccgattcaatttcttaacc

SEQ ID NO: 1071377 - DNA, 33 bp, Homo sapien
cccccagaaaaaaagtcacaagcttatttatta

SEQ ID NO: 1071378 - DNA, 33 bp, Homo sapien
cccccagaaaaaaagttacaagcttatttatta

SEQ ID NO: 1071379 - DNA, 33 bp, Homo sapien
ttgattgtcagcatcaataaaacttggccaaca

SEQ ID NO: 1071380 - DNA, 33 bp, Homo sapien
ttgattgtcagcatcagtaaaacttggccaaca

SEQ ID NO: 1071381 - DNA, 33 bp, Homo sapien
taaacctcagatgcacaacctgtctcagtgcaa

SEQ ID NO: 1071382 - DNA, 33 bp, Homo sapien
taaacctcagatgcacgacctgtctcagtgcaa

SEQ ID NO: 1071383 - DNA, 33 bp, Homo sapien
gcaccctacaatttaacacccacatgtccttag

SEQ ID NO: 1071384 - DNA, 33 bp, Homo sapien
gcaccctacaatttaagacccacatgtccttag

SEQ ID NO: 1071385 - DNA, 33 bp, Homo sapien
aagcaagtctccactacggaagcaagtctgggt

SEQ ID NO: 1071386 - DNA, 33 bp, Homo sapien
aagcaagtctccactatggaagcaagtctgggt

SEQ ID NO: 1071387 - DNA, 33 bp, Homo sapien
tccacaatggaacaaccatgtattttatattgt

SEQ ID NO: 1071388 - DNA, 33 bp, Homo sapien
tccacaatggaacaactatgtattttatattgt

SEQ ID NO: 1071389 - DNA, 33 bp, Homo sapien
caactgcaggtatctacgtgctttccaggattc

SEQ ID NO: 1071390 - DNA, 33 bp, Homo sapien
caactgcaggtatctaggtgctttccaggattc

SEQ ID NO: 1071391 - DNA, 33 bp, Homo sapien
agaaccatctttacaaccagtactatataaagt

SEQ ID NO: 1071392 - DNA, 33 bp, Homo sapien
agaaccatctttacaatcagtactatataaagt

SEQ ID NO: 1071393 - DNA, 33 bp, Homo sapien
gtggagaaggctctgacagatacccgtcataca

SEQ ID NO: 1071394 - DNA, 33 bp, Homo sapien
gtggagaaggctctgatagatacccgtcataca

SEQ ID NO: 1071395 - DNA, 33 bp, Homo sapien
tcttcaacagagcagaaccttcacagtctttgc

SEQ ID NO: 1071396 - DNA, 33 bp, Homo sapien
tcttcaacagagcagatccttcacagtctttgc

SEQ ID NO: 1071397 - DNA, 33 bp, Homo sapien
tgttggaaatgcaaaacggtgcagtaactttgg

SEQ ID NO: 1071398 - DNA, 33 bp, Homo sapien
tgttggaaatgcaaaatggtgcagtaactttgg

SEQ ID NO: 1071399 - DNA, 33 bp, Homo sapien
tcaggttggttgagaacctaaacctgagaccta

SEQ ID NO: 1071400 - DNA, 33 bp, Homo sapien
tcaggttggttgagaatctaaacctgagaccta

SEQ ID NO: 1071401 - DNA, 33 bp, Homo sapien
atgagaatctagagggaacagaacactcttgag

SEQ ID NO: 1071402 - DNA, 33 bp, Homo sapien
atgagaatctagaggggacagaacactcttgag

SEQ ID NO: 1071403 - DNA, 33 bp, Homo sapien
ggtatgctgctttaagaacctctaatctgtatg

SEQ ID NO: 1071404 - DNA, 33 bp, Homo sapien
ggtatgctgctttaaggacctctaatctgtatg

SEQ ID NO: 1071405 - DNA, 33 bp, Homo sapien
tggtgtattatttcaaacaagtgtctgtgaaat

SEQ ID NO: 1071406 - DNA, 33 bp, Homo sapien
tggtgtattatttcaagcaagtgtctgtgaaat

SEQ ID NO: 1071407 - DNA, 33 bp, Homo sapien
gggcaggatggtttacaatagttacgtctctaa

SEQ ID NO: 1071408 - DNA, 33 bp, Homo sapien
gggcaggatggtttaccatagttacgtctctaa

SEQ ID NO: 1071409 - DNA, 33 bp, Homo sapien
tttgcaagacctgaaactccggagatggtggtg

SEQ ID NO: 1071410 - DNA, 33 bp, Homo sapien
tttgcaagacctgaaattccggagatggtggtg

SEQ ID NO: 1071411 - DNA, 33 bp, Homo sapien
gaacaagtacaaagacaaattgatgcattttat

SEQ ID NO: 1071412 - DNA, 33 bp, Homo sapien
gaacaagtacaaagacgaattgatgcattttat

SEQ ID NO: 1071413 - DNA, 33 bp, Homo sapien
tgtaactcagtgtcacaactttatctaaagtca

SEQ ID NO: 1071414 - DNA, 33 bp, Homo sapien
tgtaactcagtgtcacgactttatctaaagtca

SEQ ID NO: 1071415 - DNA, 33 bp, Homo sapien
atttccaaacatactaccttagcaataggtaaa

SEQ ID NO: 1071416 - DNA, 33 bp, Homo sapien
atttccaaacatactatcttagcaataggtaaa

SEQ ID NO: 1071417 - DNA, 33 bp, Homo sapien
atgtctgttttaaagaataggctgggaccatgt

SEQ ID NO: 1071418 - DNA, 33 bp, Homo sapien
atgtctgttttaaagagtaggctgggaccatgt

SEQ ID NO: 1071419 - DNA, 33 bp, Homo sapien
cacaactctatattgaaaattgtctatgggaaa

SEQ ID NO: 1071420 - DNA, 33 bp, Homo sapien
cacaactctatattgagaattgtctatgggaaa

SEQ ID NO: 1071421 - DNA, 33 bp, Homo sapien
tgctaggaatactgcacggtctatttcaagtta

SEQ ID NO: 1071422 - DNA, 33 bp, Homo sapien
tgctaggaatactgcatggtctatttcaagtta

SEQ ID NO: 1071423 - DNA, 33 bp, Homo sapien
acacttggatgtgagacgacataattggatgct

SEQ ID NO: 1071424 - DNA, 33 bp, Homo sapien
acacttggatgtgagatgacataattggatgct

SEQ ID NO: 1071425 - DNA, 33 bp, Homo sapien
tgagctcctataacagaacttggcatacaaaaa

SEQ ID NO: 1071426 - DNA, 33 bp, Homo sapien
tgagctcctataacaggacttggcatacaaaaa

SEQ ID NO: 1071427 - DNA, 33 bp, Homo sapien
aatagatggaaaagacaatgtaataagaaacag

SEQ ID NO: 1071428 - DNA, 33 bp, Homo sapien
aatagatggaaaagacgatgtaataagaaacag

SEQ ID NO: 1071429 - DNA, 33 bp, Homo sapien
agattgtgagccctacaacaggggcataatgga

SEQ ID NO: 1071430 - DNA, 33 bp, Homo sapien
agattgtgagccctacgacaggggcataatgga

SEQ ID NO: 1071431 - DNA, 33 bp, Homo sapien
gagtcttcacaattacactcatacgtcgccgga

SEQ ID NO: 1071432 - DNA, 33 bp, Homo sapien
gagtcttcacaattacgctcatacgtcgccgga

SEQ ID NO: 1071433 - DNA, 33 bp, Homo sapien
agcagtttctctcaccaacaaacagtgaacacc

SEQ ID NO: 1071434 - DNA, 33 bp, Homo sapien
agcagtttctctcaccgacaaacagtgaacacc

SEQ ID NO: 1071435 - DNA, 33 bp, Homo sapien
tgtatttaccacttgaacagaaatgtaatctca

SEQ ID NO: 1071436 - DNA, 33 bp, Homo sapien
tgtatttaccacttgagcagaaatgtaatctca

SEQ ID NO: 1071437 - DNA, 33 bp, Homo sapien
agtgttttcatagttacagcatcagttcttttg

SEQ ID NO: 1071438 - DNA, 33 bp, Homo sapien
agtgttttcatagttatagcatcagttcttttg

SEQ ID NO: 1071439 - DNA, 33 bp, Homo sapien
tttgtttattctgccaaagcctcttactaaaac

SEQ ID NO: 1071440 - DNA, 33 bp, Homo sapien
tttgtttattctgccagagcctcttactaaaac

SEQ ID NO: 1071441 - DNA, 33 bp, Homo sapien
catgaggaagtgaggaaaatcttcaagatctat

SEQ ID NO: 1071442 - DNA, 33 bp, Homo sapien
catgaggaagtgaggacaatcttcaagatctat

SEQ ID NO: 1071443 - DNA, 33 bp, Homo sapien
ggaacctattctctcactagccctctcaattcc

SEQ ID NO: 1071444 - DNA, 33 bp, Homo sapien
ggaacctattctctcattagccctctcaattcc

SEQ ID NO: 1071445 - DNA, 33 bp, Homo sapien
aaatagaggcagagagcataactaaatcactca

SEQ ID NO: 1071446 - DNA, 33 bp, Homo sapien
aaatagaggcagagaggataactaaatcactca

SEQ ID NO: 1071447 - DNA, 33 bp, Homo sapien
ggaggatctggcagagaagctagcatgcgcaaa

SEQ ID NO: 1071448 - DNA, 33 bp, Homo sapien
ggaggatctggcagagcagctagcatgcgcaaa

SEQ ID NO: 1071449 - DNA, 33 bp, Homo sapien
ttttatgtgaaaaatccatagtcaaaaaccagg

SEQ ID NO: 1071450 - DNA, 33 bp, Homo sapien
ttttatgtgaaaaatctatagtcaaaaaccagg

SEQ ID NO: 1071451 - DNA, 33 bp, Homo sapien
ccatcattagcaaatcaaaggaattcaactgtc

SEQ ID NO: 1071452 - DNA, 33 bp, Homo sapien
ccatcattagcaaatcgaaggaattcaactgtc

SEQ ID NO: 1071453 - DNA, 33 bp, Homo sapien
ctgtctccttaacagcacatagataaccattca

SEQ ID NO: 1071454 - DNA, 33 bp, Homo sapien
ctgtctccttaacagcccatagataaccattca

SEQ ID NO: 1071455 - DNA, 33 bp, Homo sapien
tattcaagggaacccgaaaccattactgatctt

SEQ ID NO: 1071456 - DNA, 33 bp, Homo sapien
tattcaagggaacccggaaccattactgatctt

SEQ ID NO: 1071457 - DNA, 33 bp, Homo sapien
cctgactacttctgaacagctctcaagtattac

SEQ ID NO: 1071458 - DNA, 33 bp, Homo sapien
cctgactacttctgaatagctctcaagtattac

SEQ ID NO: 1071459 - DNA, 33 bp, Homo sapien
aacaagggtggcgtcagtcaaaggctgaatagg

SEQ ID NO: 1071460 - DNA, 33 bp, Homo sapien
aacaagggtggcgtcattcaaaggctgaatagg

SEQ ID NO: 1071461 - DNA, 33 bp, Homo sapien
tcctttatctgtgacaataatctttgcttttga

SEQ ID NO: 1071462 - DNA, 33 bp, Homo sapien
tcctttatctgtgacagtaatctttgcttttga

SEQ ID NO: 1071463 - DNA, 33 bp, Homo sapien
ttattatttccactcaatgaattgacccttttg

SEQ ID NO: 1071464 - DNA, 33 bp, Homo sapien
ttattatttccactcagtgaattgacccttttg

SEQ ID NO: 1071465 - DNA, 33 bp, Homo sapien
tataaaggacactggtaaaattctaacccttta

SEQ ID NO: 1071466 - DNA, 33 bp, Homo sapien
tataaaggacactggtcaaattctaacccttta

SEQ ID NO: 1071467 - DNA, 33 bp, Homo sapien
gttataacagcattccagaaagtctggaaagca

SEQ ID NO: 1071468 - DNA, 33 bp, Homo sapien
gttataacagcattccggaaagtctggaaagca

SEQ ID NO: 1071469 - DNA, 33 bp, Homo sapien
tctgaacaagggcctcactcgtaatccaagctt

SEQ ID NO: 1071470 - DNA, 33 bp, Homo sapien
tctgaacaagggcctcgctcgtaatccaagctt

SEQ ID NO: 1071471 - DNA, 33 bp, Homo sapien
tattgtacaacatggcaactatggttaataaca

SEQ ID NO: 1071472 - DNA, 33 bp, Homo sapien
tattgtacaacatggcgactatggttaataaca

SEQ ID NO: 1071473 - DNA, 33 bp, Homo sapien
actgagttgtgaggtaaatttttaacgccgcta

SEQ ID NO: 1071474 - DNA, 33 bp, Homo sapien
actgagttgtgaggtatatttttaacgccgcta

SEQ ID NO: 1071475 - DNA, 33 bp, Homo sapien
agttttggtggaagacactcgggcagtccctat

SEQ ID NO: 1071476 - DNA, 33 bp, Homo sapien
agttttggtggaagacgctcgggcagtccctat

SEQ ID NO: 1071477 - DNA, 33 bp, Homo sapien; identical to SEQ ID NO: 1071475

SEQ ID NO: 1071478 - DNA, 33 bp, Homo sapien; identical to SEQ ID NO: 1071476

SEQ ID NO: 1071479 - DNA, 33 bp, Homo sapien; identical to SEQ ID NO: 1071475

SEQ ID NO: 1071480 - DNA, 33 bp, Homo sapien; identical to SEQ ID NO: 1071476

SEQ ID NO: 1071481 - DNA, 33 bp, Homo sapien
gatgagaacaagtagaagagactagggtaagaa

SEQ ID NO: 1071482 - DNA, 33 bp, Homo sapien
gatgagaacaagtagaggagactagggtaagaa

SEQ ID NO: 1071483 - DNA, 33 bp, Homo sapien
cgatgatgcagttctaccagaaagcatcacccc

SEQ ID NO: 1071484 - DNA, 33 bp, Homo sapien
cgatgatgcagttctagcagaaagcatcacccc

SEQ ID NO: 1071485 - DNA, 33 bp, Homo sapien
ccagtcctctatcagaacacttcttttgtattt

SEQ ID NO: 1071486 - DNA, 33 bp, Homo sapien
ccagtcctctatcagagcacttcttttgtattt

SEQ ID NO: 1071487 - DNA, 33 bp, Homo sapien
ttataggtccagtttaaccagctgctgagatcc

SEQ ID NO: 1071488 - DNA, 33 bp, Homo sapien
ttataggtccagtttacccagctgctgagatcc

SEQ ID NO: 1071489 - DNA, 33 bp, Homo sapien
atcctatatttcatgccacttttctgccaacca

SEQ ID NO: 1071490 - DNA, 33 bp, Homo sapien
atcctatatttcatgctacttttctgccaacca

SEQ ID NO: 1071491 - DNA, 33 bp, Homo sapien
agagcaataaggaaaacgaaggttgagggactg

SEQ ID NO: 1071492 - DNA, 33 bp, Homo sapien
agagcaataaggaaaatgaaggttgagggactg

SEQ ID NO: 1071493 - DNA, 33 bp, Homo sapien
gggaaagcccaatgtaggtttaggagaaggtga

SEQ ID NO: 1071494 - DNA, 33 bp, Homo sapien
gggaaagcccaatgtatgtttaggagaaggtga

SEQ ID NO: 1071495 - DNA, 33 bp, Homo sapien
aacgcataaggtttgacggtgggagtaggatat

SEQ ID NO: 1071496 - DNA, 33 bp, Homo sapien
aacgcataaggtttgatggtgggagtaggatat

SEQ ID NO: 1071497 - DNA, 33 bp, Homo sapien
atagcctgaacaagcaactacaaaataggatac

SEQ ID NO: 1071498 - DNA, 33 bp, Homo sapien
atagcctgaacaagcagctacaaaataggatac

SEQ ID NO: 1071499 - DNA, 33 bp, Homo sapien
ggttcttgcagatttccaaaggtattttctttg

SEQ ID NO: 1071500 - DNA, 33 bp, Homo sapien
ggttcttgcagatttctaaaggtattttctttg

SEQ ID NO: 1071501 - DNA, 33 bp, Homo sapien
tttgtaatatttttcaatacgtgctagattata

SEQ ID NO: 1071502 - DNA, 33 bp, Homo sapien
tttgtaatatttttcagtacgtgctagattata

SEQ ID NO: 1071503 - DNA, 33 bp, Homo sapien
caatgaaatactactccacgttcattaggatgg

SEQ ID NO: 1071504 - DNA, 33 bp, Homo sapien
caatgaaatactactctacgttcattaggatgg

SEQ ID NO: 1071505 - DNA, 33 bp, Homo sapien
tttggattttcctccacgatgtagaaatgtggc

SEQ ID NO: 1071506 - DNA, 33 bp, Homo sapien
tttggattttcctccatgatgtagaaatgtggc

SEQ ID NO: 1071507 - DNA, 33 bp, Homo sapien
agtcataataatagccaccgtttactaaactat

SEQ ID NO: 1071508 - DNA, 33 bp, Homo sapien
agtcataataatagccgccgtttactaaactat

SEQ ID NO: 1071509 - DNA, 33 bp, Homo sapien
gcgcttgcatagggtcacagaaaacagtgcacc

SEQ ID NO: 1071510 - DNA, 33 bp, Homo sapien
gcgcttgcatagggtcgcagaaaacagtgcacc

SEQ ID NO: 1071511 - DNA, 33 bp, Homo sapien
tggctccccaatttataaggctgattttcttca

SEQ ID NO: 1071512 - DNA, 33 bp, Homo sapien
tggctccccaatttattaggctgattttcttca

SEQ ID NO: 1071513 - DNA, 33 bp, Homo sapien
gggaacagaatgtttacgggccttcagaggact

SEQ ID NO: 1071514 - DNA, 33 bp, Homo sapien
gggaacagaatgtttatgggccttcagaggact

SEQ ID NO: 1071515 - DNA, 33 bp, Homo sapien
ggccgtgttgtacaaacgtggctgccagaggat

SEQ ID NO: 1071516 - DNA, 33 bp, Homo sapien
ggccgtgttgtacaaatgtggctgccagaggat

SEQ ID NO: 1071517 - DNA, 33 bp, Homo sapien
tatcaaagatacctaccatcaatgtgagagcac

SEQ ID NO: 1071518 - DNA, 33 bp, Homo sapien
tatcaaagatacctactatcaatgtgagagcac

SEQ ID NO: 1071519 - DNA, 33 bp, Homo sapien
agtcatttttggttggaaaaattctaatctgag

SEQ ID NO: 1071520 - DNA, 33 bp, Homo sapien
agtcatttttggttgggaaaattctaatctgag

SEQ ID NO: 1071521 - DNA, 33 bp, Homo sapien
ctgcgatattcttcaccacttctgtcattccta

SEQ ID NO: 1071522 - DNA, 33 bp, Homo sapien
ctgcgatattcttcactacttctgtcattccta

SEQ ID NO: 1071523 - DNA, 33 bp, Homo sapien
gtagagtaaactgggactatcacgcactgttgg

SEQ ID NO: 1071524 - DNA, 33 bp, Homo sapien
gtagagtaaactgggagtatcacgcactgttgg

SEQ ID NO: 1071525 - DNA, 33 bp, Homo sapien
attatggggaaaataaacatcttggccttctgg

SEQ ID NO: 1071526 - DNA, 33 bp, Homo sapien
attatggggaaaataagcatcttggccttctgg

SEQ ID NO: 1071527 - DNA, 33 bp, Homo sapien
ttactatagctacgtactaacgcttaattttag

SEQ ID NO: 1071528 - DNA, 33 bp, Homo sapien
ttactatagctacgtagtaacgcttaattttag

SEQ ID NO: 1071529 - DNA, 33 bp, Homo sapien
acaaaaagtagtgacaccactaaacactgagga

SEQ ID NO: 1071530 - DNA, 33 bp, Homo sapien
acaaaaagtagtgacatcactaaacactgagga

SEQ ID NO: 1071531 - DNA, 33 bp, Homo sapien
aggtctatttcttcaaatgaacattgatttcat

SEQ ID NO: 1071532 - DNA, 33 bp, Homo sapien
aggtctatttcttcaagtgaacattgatttcat

SEQ ID NO: 1071533 - DNA, 33 bp, Homo sapien
ctctggagaaccctaccactacataggttcaca

SEQ ID NO: 1071534 - DNA, 33 bp, Homo sapien
ctctggagaaccctactactacataggttcaca

SEQ ID NO: 1071535 - DNA, 33 bp, Homo sapien
atcatgggtctaaagaacttgggatacttggat

SEQ ID NO: 1071536 - DNA, 33 bp, Homo sapien
atcatgggtctaaagagcttgggatacttggat

SEQ ID NO: 1071537 - DNA, 33 bp, Homo sapien
actgaactcttggcatgatccagtgaagcttac

SEQ ID NO: 1071538 - DNA, 33 bp, Homo sapien
actgaactcttggcattatccagtgaagcttac

SEQ ID NO: 1071539 - DNA, 33 bp, Homo sapien
tactacatttgtgaaaattacatcgctagtatc

SEQ ID NO: 1071540 - DNA, 33 bp, Homo sapien
tactacatttgtgaaagttacatcgctagtatc

SEQ ID NO: 1071541 - DNA, 33 bp, Homo sapien
tagggccttgcatgccgcaagttaagaagattt

SEQ ID NO: 1071542 - DNA, 33 bp, Homo sapien
tagggccttgcatgcctcaagttaagaagattt

SEQ ID NO: 1071543 - DNA, 33 bp, Homo sapien
gaggcaagaaagaaacagtgcctttttgtcaat

SEQ ID NO: 1071544 - DNA, 33 bp, Homo sapien
gaggcaagaaagaaaccgtgcctttttgtcaat

SEQ ID NO: 1071545 - DNA, 33 bp, Homo sapien
tacaaatgcaaccctgaattaaatcaattatct

SEQ ID NO: 1071546 - DNA, 33 bp, Homo sapien
tacaaatgcaaccctggattaaatcaattatct

SEQ ID NO: 1071547 - DNA, 33 bp, Homo sapien
ttcctccagtatggacaagagggaaccatgttt

SEQ ID NO: 1071548 - DNA, 33 bp, Homo sapien
ttcctccagtatggacgagagggaaccatgttt

SEQ ID NO: 1071549 - DNA, 33 bp, Homo sapien
taatctcttgtggtgacacttatttcctttcat

SEQ ID NO: 1071550 - DNA, 33 bp, Homo sapien
taatctcttgtggtgatacttatttcctttcat

SEQ ID NO: 1071551 - DNA, 33 bp, Homo sapien
gcaatgaggtgccagcaaagcctcctccaccac

SEQ ID NO: 1071552 - DNA, 33 bp, Homo sapien
gcaatgaggtgccagcgaagcctcctccaccac

SEQ ID NO: 1071553 - DNA, 33 bp, Homo sapien
atctgcagcctcatgcggagcaggacaaatctc

SEQ ID NO: 1071554 - DNA, 33 bp, Homo sapien
atctgcagcctcatgctgagcaggacaaatctc

SEQ ID NO: 1071555 - DNA, 33 bp, Homo sapien
ttgggcctcaaatcctcacgatcctgcagacca

SEQ ID NO: 1071556 - DNA, 33 bp, Homo sapien
ttgggcctcaaatcctgacgatcctgcagacca

SEQ ID NO: 1071557 - DNA, 33 bp, Homo sapien
tgtgctacactttgaacagtaaggattctgcct

SEQ ID NO: 1071558 - DNA, 33 bp, Homo sapien
tgtgctacactttgaatagtaaggattctgcct

SEQ ID NO: 1071559 - DNA, 33 bp, Homo sapien
tagttacagtagttggcactcggcagtttatcc

SEQ ID NO: 1071560 - DNA, 33 bp, Homo sapien
tagttacagtagttggtactcggcagtttatcc

SEQ ID NO: 1071561 - DNA, 33 bp, Homo sapien
ccaatcaacgttaccactgacctgagttctggt

SEQ ID NO: 1071562 - DNA, 33 bp, Homo sapien
ccaatcaacgttaccattgacctgagttctggt

SEQ ID NO: 1071563 - DNA, 33 bp, Homo sapien
tataaagcttttcccaagaattatcctttgggc

SEQ ID NO: 1071564 - DNA, 33 bp, Homo sapien
tataaagcttttcccaggaattatcctttgggc

SEQ ID NO: 1071565 - DNA, 33 bp, Homo sapien
tgtcatttctcctgcacgtgttgcacattgtcc

SEQ ID NO: 1071566 - DNA, 33 bp, Homo sapien
tgtcatttctcctgcatgtgttgcacattgtcc

SEQ ID NO: 1071567 - DNA, 33 bp, Homo sapien
aggggaaaaagtcagaagctaccatgagaaaat

SEQ ID NO: 1071568 - DNA, 33 bp, Homo sapien
aggggaaaaagtcagaggctaccatgagaaaat

SEQ ID NO: 1071569 - DNA, 33 bp, Homo sapien
taaacacttggcagacagaaagaaaaattctca

SEQ ID NO: 1071570 - DNA, 33 bp, Homo sapien
taaacacttggcagacggaaagaaaaattctca

SEQ ID NO: 1071571 - DNA, 33 bp, Homo sapien
tcagtttataatctcacgttgtgtaaatggctg

SEQ ID NO: 1071572 - DNA, 33 bp, Homo sapien
tcagtttataatctcaggttgtgtaaatggctg

SEQ ID NO: 1071573 - DNA, 33 bp, Homo sapien
tcatgttgaagcattccaaaaatacagagaatt

SEQ ID NO: 1071574 - DNA, 33 bp, Homo sapien
tcatgttgaagcattcgaaaaatacagagaatt

SEQ ID NO: 1071575 - DNA, 33 bp, Homo sapien
attgtatccgccttccaagagtagccattgcta

SEQ ID NO: 1071576 - DNA, 33 bp, Homo sapien
attgtatccgccttccgagagtagccattgcta

SEQ ID NO: 1071577 - DNA, 33 bp, Homo sapien
taagtgctctttattcgattccaccacaaagtc

SEQ ID NO: 1071578 - DNA, 33 bp, Homo sapien
taagtgctctttattctattccaccacaaagtc

SEQ ID NO: 1071579 - DNA, 33 bp, Homo sapien
gatggtaacctaagacaagggcctagttcaacc

SEQ ID NO: 1071580 - DNA, 33 bp, Homo sapien
gatggtaacctaagacgagggcctagttcaacc

SEQ ID NO: 1071581 - DNA, 33 bp, Homo sapien
taatgccgttgttcaaaggtagtattcttgtaa

SEQ ID NO: 1071582 - DNA, 33 bp, Homo sapien
taatgccgttgttcaatggtagtattcttgtaa

SEQ ID NO: 1071583 - DNA, 33 bp, Homo sapien
aataatccaatgttctaaaacttctcagaataa

SEQ ID NO: 1071584 - DNA, 33 bp, Homo sapien
aataatccaatgttctgaaacttctcagaataa

SEQ ID NO: 1071585 - DNA, 33 bp, Homo sapien
catcctaataaaaaaccggctatatgcaaataa

SEQ ID NO: 1071586 - DNA, 33 bp, Homo sapien
catcctaataaaaaactggctatatgcaaataa

SEQ ID NO: 1071587 - DNA, 33 bp, Homo sapien
taggatacgttaacaaccttgatatgctggaag

SEQ ID NO: 1071588 - DNA, 33 bp, Homo sapien
taggatacgttaacaatcttgatatgctggaag

SEQ ID NO: 1071589 - DNA, 33 bp, Homo sapien
tggaaaattttcctcgaccaatggtgcttttct

SEQ ID NO: 1071590 - DNA, 33 bp, Homo sapien
tggaaaattttcctcggccaatggtgcttttct

SEQ ID NO: 1071591 - DNA, 33 bp, Homo sapien
taatttgaactccaggcataaatgcagcacctt

SEQ ID NO: 1071592 - DNA, 33 bp, Homo sapien
taatttgaactccagggataaatgcagcacctt

SEQ ID NO: 1071593 - DNA, 33 bp, Homo sapien
tcaccactgagggttacagcactctgtgtcgcc

SEQ ID NO: 1071594 - DNA, 33 bp, Homo sapien
tcaccactgagggttatagcactctgtgtcgcc

SEQ ID NO: 1071595 - DNA, 33 bp, Homo sapien
gctgatggatgccccaaattgtaccacatggcc

SEQ ID NO: 1071596 - DNA, 33 bp, Homo sapien
gctgatggatgccccagattgtaccacatggcc

SEQ ID NO: 1071597 - DNA, 33 bp, Homo sapien
gtaagaactcaataaactgtaactgttctcaat

SEQ ID NO: 1071598 - DNA, 33 bp, Homo sapien
gtaagaactcaataaagtgtaactgttctcaat

SEQ ID NO: 1071599 - DNA, 33 bp, Homo sapien
agaacacatggattacaagtcaggaatgaaaga

SEQ ID NO: 1071600 - DNA, 33 bp, Homo sapien
agaacacatggattaccagtcaggaatgaaaga

SEQ ID NO: 1071601 - DNA, 33 bp, Homo sapien
taaataagcattataggccaaagttgttttgat

SEQ ID NO: 1071602 - DNA, 33 bp, Homo sapien
taaataagcattatagtccaaagttgttttgat

SEQ ID NO: 1071603 - DNA, 33 bp, Homo sapien
gtattaagggcctcctaaagagattaaatgaaa

SEQ ID NO: 1071604 - DNA, 33 bp, Homo sapien
gtattaagggcctcctgaagagattaaatgaaa

SEQ ID NO: 1071605 - DNA, 33 bp, Homo sapien
gggtgtttccagtactcactaagatgtctctgt

SEQ ID NO: 1071606 - DNA, 33 bp, Homo sapien
gggtgtttccagtacttactaagatgtctctgt

SEQ ID NO: 1071607 - DNA, 33 bp, Homo sapien
ctaccaatccatactacgactcatatcaagtga

SEQ ID NO: 1071608 - DNA, 33 bp, Homo sapien
ctaccaatccatactatgactcatatcaagtga

SEQ ID NO: 1071609 - DNA, 33 bp, Homo sapien
ccaattcctccaatgcccaagtctttaaatacc

SEQ ID NO: 1071610 - DNA, 33 bp, Homo sapien
ccaattcctccaatgctcaagtctttaaatacc

SEQ ID NO: 1071611 - DNA, 33 bp, Homo sapien
catgttcccagtagccaagaaagtacacagatc

SEQ ID NO: 1071612 - DNA, 33 bp, Homo sapien
catgttcccagtagccgagaaagtacacagatc

SEQ ID NO: 1071613 - DNA, 33 bp, Homo sapien
aagcaagatgactttcaaagatgtctggaagtt

SEQ ID NO: 1071614 - DNA, 33 bp, Homo sapien
aagcaagatgactttcgaagatgtctggaagtt

SEQ ID NO: 1071615 - DNA, 33 bp, Homo sapien
gctttggtcaaccgaaagtggcagaagtgatgg

SEQ ID NO: 1071616 - DNA, 33 bp, Homo sapien
gctttggtcaaccgaatgtggcagaagtgatgg

SEQ ID NO: 1071617 - DNA, 33 bp, Homo sapien
ttttttttaggaataacgtaactgctggttggt

SEQ ID NO: 1071618 - DNA, 33 bp, Homo sapien
ttttttttaggaataatgtaactgctggttggt

SEQ ID NO: 1071619 - DNA, 33 bp, Homo sapien
ttgaatgtgtaatacaaggcaatattaatcttg

SEQ ID NO: 1071620 - DNA, 33 bp, Homo sapien
ttgaatgtgtaatacacggcaatattaatcttg

SEQ ID NO: 1071621 - DNA, 33 bp, Homo sapien
aggttgtggtttaccacggctattttcgtgcat

SEQ ID NO: 1071622 - DNA, 33 bp, Homo sapien
aggttgtggtttaccatggctattttcgtgcat

SEQ ID NO: 1071623 - DNA, 33 bp, Homo sapien
gttactgactggttcaagaataattatgtgcat

SEQ ID NO: 1071624 - DNA, 33 bp, Homo sapien
gttactgactggttcaggaataattatgtgcat

SEQ ID NO: 1071625 - DNA, 33 bp, Homo sapien
tgcttcagaaagtaacaaaatgggatataagca

SEQ ID NO: 1071626 - DNA, 33 bp, Homo sapien
tgcttcagaaagtaacgaaatgggatataagca

SEQ ID NO: 1071627 - DNA, 33 bp, Homo sapien
gcaatttgacatcaaacggaggctgcttgccat

SEQ ID NO: 1071628 - DNA, 33 bp, Homo sapien
gcaatttgacatcaaatggaggctgcttgccat

SEQ ID NO: 1071629 - DNA, 33 bp, Homo sapien
cattcaatgacggataaatacaaggtataaatg

SEQ ID NO: 1071630 - DNA, 33 bp, Homo sapien
cattcaatgacggatacatacaaggtataaatg

SEQ ID NO: 1071631 - DNA, 33 bp, Homo sapien
aatctcatgaataaaactgatgccttataaaag

SEQ ID NO: 1071632 - DNA, 33 bp, Homo sapien
aatctcatgaataaaattgatgccttataaaag

SEQ ID NO: 1071633 - DNA, 33 bp, Homo sapien
ttacagttatggaggccgcaaattccaagatta

SEQ ID NO: 1071634 - DNA, 33 bp, Homo sapien
ttacagttatggaggctgcaaattccaagatta

SEQ ID NO: 1071635 - DNA, 33 bp, Homo sapien
acaaagagcatggctgaactgtgtttatgttct

SEQ ID NO: 1071636 - DNA, 33 bp, Homo sapien
acaaagagcatggctgtactgtgtttatgttct

SEQ ID NO: 1071637 - DNA, 33 bp, Homo sapien
cttttggataattgcagtctttccgcaaagcac

SEQ ID NO: 1071638 - DNA, 33 bp, Homo sapien
cttttggataattgcattctttccgcaaagcac

SEQ ID NO: 1071639 - DNA, 33 bp, Homo sapien
acaccatagcgagagactcaaaggcaggaaaga

SEQ ID NO: 1071640 - DNA, 33 bp, Homo sapien
acaccatagcgagagagtcaaaggcaggaaaga

SEQ ID NO: 1071641 - DNA, 33 bp, Homo sapien
attatgagggtcaaatgagatgatacttgcttg

SEQ ID NO: 1071642 - DNA, 33 bp, Homo sapien
attatgagggtcaaattagatgatacttgcttg

SEQ ID NO: 1071643 - DNA, 33 bp, Homo sapien
catgtggactttctcaatactgggcattcaaaa

SEQ ID NO: 1071644 - DNA, 33 bp, Homo sapien
catgtggactttctcagtactgggcattcaaaa

SEQ ID NO: 1071645 - DNA, 33 bp, Homo sapien
gctgcaaatggtagcaagtgttaattatagatt

SEQ ID NO: 1071646 - DNA, 33 bp, Homo sapien
gctgcaaatggtagcaggtgttaattatagatt

SEQ ID NO: 1071647 - DNA, 33 bp, Homo sapien
ttaaaaggttatctaaaagtcattgcatgtaac

SEQ ID NO: 1071648 - DNA, 33 bp, Homo sapien
ttaaaaggttatctaacagtcattgcatgtaac

SEQ ID NO: 1071649 - DNA, 33 bp, Homo sapien
gctgctacttcttgtcccttttcatggctgtac

SEQ ID NO: 1071650 - DNA, 33 bp, Homo sapien
gctgctacttcttgtctcttttcatggctgtac

SEQ ID NO: 1071651 - DNA, 33 bp, Homo sapien
catcatgtcaagaaaacctaaaccacaattctt

SEQ ID NO: 1071652 - DNA, 33 bp, Homo sapien
catcatgtcaagaaaatctaaaccacaattctt

SEQ ID NO: 1071653 - DNA, 33 bp, Homo sapien
tcactagcatcttacaatcaggtttacacaggt

SEQ ID NO: 1071654 - DNA, 33 bp, Homo sapien
tcactagcatcttacagtcaggtttacacaggt

SEQ ID NO: 1071655 - DNA, 33 bp, Homo sapien
tgcctttcatctcctacagaaaagagcctgaag

SEQ ID NO: 1071656 - DNA, 33 bp, Homo sapien
tgcctttcatctcctatagaaaagagcctgaag

SEQ ID NO: 1071657 - DNA, 33 bp, Homo sapien
tgcccttgactgagaacagcactactaatagcc

SEQ ID NO: 1071658 - DNA, 33 bp, Homo sapien
tgcccttgactgagaatagcactactaatagcc

SEQ ID NO: 1071659 - DNA, 33 bp, Homo sapien
attgtaagcatttttcaccacttactttttcac

SEQ ID NO: 1071660 - DNA, 33 bp, Homo sapien
attgtaagcatttttcgccacttactttttcac

SEQ ID NO: 1071661 - DNA, 33 bp, Homo sapien
ccatgtgtgaagtagaaactattacagagatac

SEQ ID NO: 1071662 - DNA, 33 bp, Homo sapien
ccatgtgtgaagtagagactattacagagatac

SEQ ID NO: 1071663 - DNA, 33 bp, Homo sapien
gaccttgggcaagatacgtaaatgctgtgcacc

SEQ ID NO: 1071664 - DNA, 33 bp, Homo sapien
gaccttgggcaagatatgtaaatgctgtgcacc

SEQ ID NO: 1071665 - DNA, 33 bp, Homo sapien
aagaattgaaatcctccattcgtgagtctcctg

SEQ ID NO: 1071666 - DNA, 33 bp, Homo sapien
aagaattgaaatcctcgattcgtgagtctcctg

SEQ ID NO: 1071667 - DNA, 33 bp, Homo sapien
ctaagtaagtaatacaaagggcatttcaaaata

SEQ ID NO: 1071668 - DNA, 33 bp, Homo sapien
ctaagtaagtaatacagagggcatttcaaaata

SEQ ID NO: 1071669 - DNA, 33 bp, Homo sapien
gccaggtagagagaacactagattcaaaggcct

SEQ ID NO: 1071670 - DNA, 33 bp, Homo sapien
gccaggtagagagaacgctagattcaaaggcct

SEQ ID NO: 1071671 - DNA, 33 bp, Homo sapien
tatacttccatttacaatctaatggctagaact

SEQ ID NO: 1071672 - DNA, 33 bp, Homo sapien
tatacttccatttacagtctaatggctagaact

SEQ ID NO: 1071673 - DNA, 33 bp, Homo sapien
aagtagaatcacgtgcagaaaaattcttctagg

SEQ ID NO: 1071674 - DNA, 33 bp, Homo sapien
aagtagaatcacgtgccgaaaaattcttctagg

SEQ ID NO: 1071675 - DNA, 33 bp, Homo sapien
tctcaaatggttactcagaattcaaccttgtgt

SEQ ID NO: 1071676 - DNA, 33 bp, Homo sapien
tctcaaatggttactcggaattcaaccttgtgt

SEQ ID NO: 1071677 - DNA, 33 bp, Homo sapien
aatagtagacaaaataacaagtcagttgagtta

SEQ ID NO: 1071678 - DNA, 33 bp, Homo sapien
aatagtagacaaaatagcaagtcagttgagtta

SEQ ID NO: 1071679 - DNA, 33 bp, Homo sapien
ttgaattaccaaattgaatagatgtgaagcagc

SEQ ID NO: 1071680 - DNA, 33 bp, Homo sapien
ttgaattaccaaattgcatagatgtgaagcagc

SEQ ID NO: 1071681 - DNA, 33 bp, Homo sapien
ttctgtaacatggcagaaagcactggatagtgt

SEQ ID NO: 1071682 - DNA, 33 bp, Homo sapien
ttctgtaacatggcaggaagcactggatagtgt

SEQ ID NO: 1071683 - DNA, 33 bp, Homo sapien
cctaaggaggagttcaactagaacctgaatcaa

SEQ ID NO: 1071684 - DNA, 33 bp, Homo sapien
cctaaggaggagttcatctagaacctgaatcaa

SEQ ID NO: 1071685 - DNA, 33 bp, Homo sapien
gatggagctctgatcacgggattagtgttctta

SEQ ID NO: 1071686 - DNA, 33 bp, Homo sapien
gatggagctctgatcatgggattagtgttctta

SEQ ID NO: 1071687 - DNA, 33 bp, Homo sapien
cacaagtgtttacatccatgcttttgtgcagac

SEQ ID NO: 1071688 - DNA, 33 bp, Homo sapien
cacaagtgtttacatcgatgcttttgtgcagac

SEQ ID NO: 1071689 - DNA, 33 bp, Homo sapien
ccattaacaagggctccactctcatgatctaac

SEQ ID NO: 1071690 - DNA, 33 bp, Homo sapien
ccattaacaagggctctactctcatgatctaac

SEQ ID NO: 1071691 - DNA, 33 bp, Homo sapien
ctttggatactgtcaacgcttcagaattttgct

SEQ ID NO: 1071692 - DNA, 33 bp, Homo sapien
ctttggatactgtcaatgcttcagaattttgct

SEQ ID NO: 1071693 - DNA, 33 bp, Homo sapien
gtctggtgatgttagaaggagattgaagatgga

SEQ ID NO: 1071694 - DNA, 33 bp, Homo sapien
gtctggtgatgttagagggagattgaagatgga

SEQ ID NO: 1071695 - DNA, 33 bp, Homo sapien
acacttccattttgcacgataatttcctgaaat

SEQ ID NO: 1071696 - DNA, 33 bp, Homo sapien
acacttccattttgcatgataatttcctgaaat

SEQ ID NO: 1071697 - DNA, 33 bp, Homo sapien
aagctgcagagatacactgtacgacacggtgac

SEQ ID NO: 1071698 - DNA, 33 bp, Homo sapien
aagctgcagagatacattgtacgacacggtgac

SEQ ID NO: 1071699 - DNA, 33 bp, Homo sapien
catctttaggaaataaaagacatttgaaagcca

SEQ ID NO: 1071700 - DNA, 33 bp, Homo sapien
catctttaggaaataagagacatttgaaagcca

SEQ ID NO: 1071701 - DNA, 33 bp, Homo sapien
ctaatgtttgcctttaaataatatacccaagat

SEQ ID NO: 1071702 - DNA, 33 bp, Homo sapien
ctaatgtttgcctttacataatatacccaagat

SEQ ID NO: 1071703 - DNA, 33 bp, Homo sapien
gtagtaaaccatagacagtacctgctacataat

SEQ ID NO: 1071704 - DNA, 33 bp, Homo sapien
gtagtaaaccatagacggtacctgctacataat

SEQ ID NO: 1071705 - DNA, 33 bp, Homo sapien
acagtacagttttcacacatacaatattcagta

SEQ ID NO: 1071706 - DNA, 33 bp, Homo sapien
acagtacagttttcacgcatacaatattcagta

SEQ ID NO: 1071707 - DNA, 33 bp, Homo sapien
ctgtcacaatgactcacacacaaggaccagaca

SEQ ID NO: 1071708 - DNA, 33 bp, Homo sapien
ctgtcacaatgactcatacacaaggaccagaca

SEQ ID NO: 1071709 - DNA, 33 bp, Homo sapien
ctcgagtggcccttaaatgttcctttccactta

SEQ ID NO: 1071710 - DNA, 33 bp, Homo sapien
ctcgagtggcccttaagtgttcctttccactta

SEQ ID NO: 1071711 - DNA, 33 bp, Homo sapien
cactcaaatatacagccaggaacagaaacagct

SEQ ID NO: 1071712 - DNA, 33 bp, Homo sapien
cactcaaatatacagcgaggaacagaaacagct

SEQ ID NO: 1071713 - DNA, 33 bp, Homo sapien
atgttttcgcaaaatcaacttttcattttgttg

SEQ ID NO: 1071714 - DNA, 33 bp, Homo sapien
atgttttcgcaaaatcgacttttcattttgttg

SEQ ID NO: 1071715 - DNA, 33 bp, Homo sapien
gttaacagtaatccaaactttaattttaccttt

SEQ ID NO: 1071716 - DNA, 33 bp, Homo sapien
gttaacagtaatccaagctttaattttaccttt

SEQ ID NO: 1071717 - DNA, 33 bp, Homo sapien
caggtctcatcacaacagtaacaacacacaggt

SEQ ID NO: 1071718 - DNA, 33 bp, Homo sapien
caggtctcatcacaacggtaacaacacacaggt

SEQ ID NO: 1071719 - DNA, 33 bp, Homo sapien
tctcttgctcagaaaccaatgaatcaatcagta

SEQ ID NO: 1071720 - DNA, 33 bp, Homo sapien
tctcttgctcagaaactaatgaatcaatcagta

SEQ ID NO: 1071721 - DNA, 33 bp, Homo sapien
gtcgtcgtggacatacaaagtcaaaacaaaaca

SEQ ID NO: 1071722 - DNA, 33 bp, Homo sapien
gtcgtcgtggacatacgaagtcaaaacaaaaca

SEQ ID NO: 1071723 - DNA, 33 bp, Homo sapien
ggagagtggagttgccaacaaattctttataga

SEQ ID NO: 1071724 - DNA, 33 bp, Homo sapien
ggagagtggagttgccgacaaattctttataga

SEQ ID NO: 1071725 - DNA, 33 bp, Homo sapien
tgtttgaaggaaagtacagtgtcagacttgtct

SEQ ID NO: 1071726 - DNA, 33 bp, Homo sapien
tgtttgaaggaaagtatagtgtcagacttgtct

SEQ ID NO: 1071727 - DNA, 33 bp, Homo sapien
gtagatgttgttagtaaaaggtctaggctaggg

SEQ ID NO: 1071728 - DNA, 33 bp, Homo sapien
gtagatgttgttagtagaaggtctaggctaggg

SEQ ID NO: 1071729 - DNA, 33 bp, Homo sapien
cccttgtgaaaatgtacgtggagccaccagagg

SEQ ID NO: 1071730 - DNA, 33 bp, Homo sapien
cccttgtgaaaatgtatgtggagccaccagagg

SEQ ID NO: 1071731 - DNA, 33 bp, Homo sapien
cagtgtcatttgctgacatctcataggtgtttc

SEQ ID NO: 1071732 - DNA, 33 bp, Homo sapien
cagtgtcatttgctgagatctcataggtgtttc

SEQ ID NO: 1071733 - DNA, 33 bp, Homo sapien
aaaggcttccgtattacaaagtggcaccacttg

SEQ ID NO: 1071734 - DNA, 33 bp, Homo sapien
aaaggcttccgtattataaagtggcaccacttg

SEQ ID NO: 1071735 - DNA, 33 bp, Homo sapien
tgcagcctttgccgaacgaaagaaaccattttt

SEQ ID NO: 1071736 - DNA, 33 bp, Homo sapien
tgcagcctttgccgaatgaaagaaaccattttt

SEQ ID NO: 1071737 - DNA, 33 bp, Homo sapien
agatagaagcagtcaactgagttaactgttcta

SEQ ID NO: 1071738 - DNA, 33 bp, Homo sapien
agatagaagcagtcaattgagttaactgttcta

SEQ ID NO: 1071739 - DNA, 33 bp, Homo sapien
gttttgccccacagcacgctaagtttcaggaaa

SEQ ID NO: 1071740 - DNA, 33 bp, Homo sapien
gttttgccccacagcatgctaagtttcaggaaa

SEQ ID NO: 1071741 - DNA, 33 bp, Homo sapien
atacgatgtcagaaccactaaaagaagcctgaa

SEQ ID NO: 1071742 - DNA, 33 bp, Homo sapien
atacgatgtcagaacctctaaaagaagcctgaa

SEQ ID NO: 1071743 - DNA, 33 bp, Homo sapien
gggaggaaccaagtgacagattattaaattatg

SEQ ID NO: 1071744 - DNA, 33 bp, Homo sapien
gggaggaaccaagtgagagattattaaattatg

SEQ ID NO: 1071745 - DNA, 33 bp, Homo sapien
ggtttgcagataccaacatttctgaatcaatta

SEQ ID NO: 1071746 - DNA, 33 bp, Homo sapien
ggtttgcagataccaagatttctgaatcaatta

SEQ ID NO: 1071747 - DNA, 33 bp, Homo sapien
ggaaatcaaaatgtcaataagatatcaccttac

SEQ ID NO: 1071748 - DNA, 33 bp, Homo sapien
ggaaatcaaaatgtcagtaagatatcaccttac

SEQ ID NO: 1071749 - DNA, 33 bp, Homo sapien
tcttagggcaatggtaacgggatcttttctcat

SEQ ID NO: 1071750 - DNA, 33 bp, Homo sapien
tcttagggcaatggtagcgggatcttttctcat

SEQ ID NO: 1071751 - DNA, 33 bp, Homo sapien
attcagttgaagattcaaagatagttgactaca

SEQ ID NO: 1071752 - DNA, 33 bp, Homo sapien
attcagttgaagattcgaagatagttgactaca

SEQ ID NO: 1071753 - DNA, 33 bp, Homo sapien
aatacctagaacacaaataatcaacttgagatc

SEQ ID NO: 1071754 - DNA, 33 bp, Homo sapien
aatacctagaacacaattaatcaacttgagatc

SEQ ID NO: 1071755 - DNA, 33 bp, Homo sapien
gctttttacacaaaaacgaccagtcactttaac

SEQ ID NO: 1071756 - DNA, 33 bp, Homo sapien
gctttttacacaaaaatgaccagtcactttaac

SEQ ID NO: 1071757 - DNA, 33 bp, Homo sapien
aagtttactacaaaggaacattaatcaagatga

SEQ ID NO: 1071758 - DNA, 33 bp, Homo sapien
aagtttactacaaagggacattaatcaagatga

SEQ ID NO: 1071759 - DNA, 33 bp, Homo sapien
gataactttagataaacgcttcaggaaatttca

SEQ ID NO: 1071760 - DNA, 33 bp, Homo sapien
gataactttagataaatgcttcaggaaatttca

SEQ ID NO: 1071761 - DNA, 33 bp, Homo sapien
gattgatgattaattgaaaatattgaattcaca

SEQ ID NO: 1071762 - DNA, 33 bp, Homo sapien
gattgatgattaattggaaatattgaattcaca

SEQ ID NO: 1071763 - DNA, 33 bp, Homo sapien
ctctcacccaatgtacgatgttcatccttcaac

SEQ ID NO: 1071764 - DNA, 33 bp, Homo sapien
ctctcacccaatgtactatgttcatccttcaac

SEQ ID NO: 1071765 - DNA, 33 bp, Homo sapien
ttctttgatgaatctaaagcctaagaatagttg

SEQ ID NO: 1071766 - DNA, 33 bp, Homo sapien
ttctttgatgaatctatagcctaagaatagttg

SEQ ID NO: 1071767 - DNA, 33 bp, Homo sapien
ataaatgaaaatataccgcaacatctatacatg

SEQ ID NO: 1071768 - DNA, 33 bp, Homo sapien
ataaatgaaaatatacggcaacatctatacatg

SEQ ID NO: 1071769 - DNA, 33 bp, Homo sapien; identical to SEQ ID NO: 1071697

SEQ ID NO: 1071770 - DNA, 33 bp, Homo sapien; identical to SEQ ID NO: 1071698

SEQ ID NO: 1071771 - DNA, 33 bp, Homo sapien
actaaaacagttattacaacagagagtattctt

SEQ ID NO: 1071772 - DNA, 33 bp, Homo sapien
actaaaacagttattagaacagagagtattctt

SEQ ID NO: 1071773 - DNA, 33 bp, Homo sapien
aaaattgctattctgaataactgctctcttaat

SEQ ID NO: 1071774 - DNA, 33 bp, Homo sapien
aaaattgctattctgagtaactgctctcttaat

SEQ ID NO: 1071775 - DNA, 33 bp, Homo sapien; identical to SEQ ID NO: 1071773

SEQ ID NO: 1071776 - DNA, 33 bp, Homo sapien; identical to SEQ ID NO: 1071774

SEQ ID NO: 1071777 - DNA, 33 bp, Homo sapien
tttcaaaataactgtccagtctaagactttaaa

SEQ ID NO: 1071778 - DNA, 33 bp, Homo sapien
tttcaaaataactgtcgagtctaagactttaaa

SEQ ID NO: 1071779 - DNA, 33 bp, Homo sapien
tgcttaactaagttcaaggataagtcactatga

SEQ ID NO: 1071780 - DNA, 33 bp, Homo sapien
tgcttaactaagttcacggataagtcactatga

SEQ ID NO: 1071781 - DNA, 33 bp, Homo sapien; identical to SEQ ID NO: 1071779

SEQ ID NO: 1071782 - DNA, 33 bp, Homo sapien; identical to SEQ ID NO: 1071780

SEQ ID NO: 1071783 - DNA, 33 bp, Homo sapien
ctccacagtgttctaaacccaaagaatctttca

SEQ ID NO: 1071784 - DNA, 33 bp, Homo sapien
ctccacagtgttctaagcccaaagaatctttca

SEQ ID NO: 1071785 - DNA, 33 bp, Homo sapien; identical to SEQ ID NO: 1071783

SEQ ID NO: 1071786 - DNA, 33 bp, Homo sapien; identical to SEQ ID NO: 1071784

SEQ ID NO: 1071787 - DNA, 33 bp, Homo sapien
aggatctatacctcaaacttcagcatcacacaa

SEQ ID NO: 1071788 - DNA, 33 bp, Homo sapien
aggatctatacctcaatcttcagcatcacacaa

SEQ ID NO: 1071789 - DNA, 33 bp, Homo sapien
ctttagtgaataaacactctttaccgtgtatcc

SEQ ID NO: 1071790 - DNA, 33 bp, Homo sapien
ctttagtgaataaacattctttaccgtgtatcc

SEQ ID NO: 1071791 - DNA, 33 bp, Homo sapien; identical to SEQ ID NO: 1071789

SEQ ID NO: 1071792 - DNA, 33 bp, Homo sapien; identical to SEQ ID NO: 1071790

SEQ ID NO: 1071793 - DNA, 33 bp, Homo sapien
ttggttcctttgcttgcaatattctttgcatcg

SEQ ID NO: 1071794 - DNA, 33 bp, Homo sapien
ttggttcctttgcttggaatattctttgcatcg

SEQ ID NO: 1071795 - DNA, 33 bp, Homo sapien
gatagtagttttcaaacagtggaaagatatttt

SEQ ID NO: 1071796 - DNA, 33 bp, Homo sapien
gatagtagttttcaaatagtggaaagatatttt

SEQ ID NO: 1071797 - DNA, 33 bp, Homo sapien
attgactactttaaaccgaagatggaaaattga

SEQ ID NO: 1071798 - DNA, 33 bp, Homo sapien
attgactactttaaactgaagatggaaaattga

SEQ ID NO: 1071799 - DNA, 33 bp, Homo sapien
ggacacatacaaatgaaccttggtccaggagca

SEQ ID NO: 1071800 - DNA, 33 bp, Homo sapien
ggacacatacaaatgagccttggtccaggagca

SEQ ID NO: 1071801 - DNA, 33 bp, Homo sapien; identical to SEQ ID NO: 1071799

SEQ ID NO: 1071802 - DNA, 33 bp, Homo sapien; identical to SEQ ID NO: 1071800

SEQ ID NO: 1071803 - DNA, 33 bp, Homo sapien
atttctgaaaatttccaaaggttaacaaattgg

SEQ ID NO: 1071804 - DNA, 33 bp, Homo sapien
atttctgaaaatttccgaaggttaacaaattgg

SEQ ID NO: 1071805 - DNA, 33 bp, Homo sapien; identical to SEQ ID NO: 1071803

SEQ ID NO: 1071806 - DNA, 33 bp, Homo sapien; identical to SEQ ID NO: 1071804

SEQ ID NO: 1071807 - DNA, 33 bp, Homo sapien
aaacaggactatgataataactaggcactgtag

SEQ ID NO: 1071808 - DNA, 33 bp, Homo sapien
aaacaggactatgatagtaactaggcactgtag

SEQ ID NO: 1071809 - DNA, 33 bp, Homo sapien; identical to SEQ ID NO: 1071807

SEQ ID NO: 1071810 - DNA, 33 bp, Homo sapien; identical to SEQ ID NO: 1071808

SEQ ID NO: 1071811 - DNA, 33 bp, Homo sapien
gcccttcagaacctgactacgcttccaaaatgc

SEQ ID NO: 1071812 - DNA, 33 bp, Homo sapien
gcccttcagaacctgattacgcttccaaaatgc

SEQ ID NO: 1071813 - DNA, 33 bp, Homo sapien; identical to SEQ ID NO: 1071811

SEQ ID NO: 1071814 - DNA, 33 bp, Homo sapien; identical to SEQ ID NO: 1071812

SEQ ID NO: 1071815 - DNA, 33 bp, Homo sapien
gggtgtactttaatacgcatgggtagttctggt

SEQ ID NO: 1071816 - DNA, 33 bp, Homo sapien
gggtgtactttaatactcatgggtagttctggt

SEQ ID NO: 1071817 - DNA, 33 bp, Homo sapien
taggcgtatgagcctccaaaataggttagtgtc

SEQ ID NO: 1071818 - DNA, 33 bp, Homo sapien
taggcgtatgagcctctaaaataggttagtgtc

SEQ ID NO: 1071819 - DNA, 33 bp, Homo sapien
cattttcagtcgtgtaaacataaacatgctatt

SEQ ID NO: 1071820 - DNA, 33 bp, Homo sapien
cattttcagtcgtgtacacataaacatgctatt

SEQ ID NO: 1071821 - DNA, 33 bp, Homo sapien; identical to SEQ ID NO: 1071819

SEQ ID NO: 1071822 - DNA, 33 bp, Homo sapien; identical to SEQ ID NO: 1071820

SEQ ID NO: 1071823 - DNA, 33 bp, Homo sapien
tgtttatgaacttcacacattttcagtcgtgta

SEQ ID NO: 1071824 - DNA, 33 bp, Homo sapien
tgtttatgaacttcacgcattttcagtcgtgta

SEQ ID NO: 1071825 - DNA, 33 bp, Homo sapien; identical to SEQ ID NO: 1071823

SEQ ID NO: 1071826 - DNA, 33 bp, Homo sapien; identical to SEQ ID NO: 1071824

SEQ ID NO: 1071827 - DNA, 33 bp, Homo sapien
atcaagcagaagaacgaatgagcgagcttgaag

SEQ ID NO: 1071828 - DNA, 33 bp, Homo sapien
atcaagcagaagaacgcatgagcgagcttgaag

SEQ ID NO: 1071829 - DNA, 33 bp, Homo sapien
gatgaggcaattactccagtaccccgagtgaat

SEQ ID NO: 1071830 - DNA, 33 bp, Homo sapien
gatgaggcaattactctagtaccccgagtgaat

SEQ ID NO: 1071831 - DNA, 33 bp, Homo sapien
cctgaaggaaaagttaagtgacataagccccat

SEQ ID NO: 1071832 - DNA, 33 bp, Homo sapien
cctgaaggaaaagttaggtgacataagccccat

SEQ ID NO: 1071833 - DNA, 33 bp, Homo sapien
actttccattggaataagtcaggaatgtctacg

SEQ ID NO: 1071834 - DNA, 33 bp, Homo sapien
actttccattggaatacgtcaggaatgtctacg

SEQ ID NO: 1071835 - DNA, 33 bp, Homo sapien
tagcaaatgagccagacagttaccagagagttt

SEQ ID NO: 1071836 - DNA, 33 bp, Homo sapien
tagcaaatgagccagatagttaccagagagttt

SEQ ID NO: 1071837 - DNA, 33 bp, Homo sapien
aggctggcttcctcacaccaaggatatcacctc

SEQ ID NO: 1071838 - DNA, 33 bp, Homo sapien
aggctggcttcctcacgccaaggatatcacctc

SEQ ID NO: 1071839 - DNA, 33 bp, Homo sapien
atccagtccgtttccactcttagccctgggaag

SEQ ID NO: 1071840 - DNA, 33 bp, Homo sapien
atccagtccgtttccattcttagccctgggaag

SEQ ID NO: 1071841 - DNA, 33 bp, Homo sapien
agcctgtttggtaatacgttgagagtgtgttga

SEQ ID NO: 1071842 - DNA, 33 bp, Homo sapien
agcctgtttggtaatatgttgagagtgtgttga

SEQ ID NO: 1071843 - DNA, 33 bp, Homo sapien
tctctgttcatcttccaagaaaacgtaacctac

SEQ ID NO: 1071844 - DNA, 33 bp, Homo sapien
tctctgttcatcttccgagaaaacgtaacctac

SEQ ID NO: 1071845 - DNA, 33 bp, Homo sapien
tgctatggtttttgataagtgtgcaatggcaag

SEQ ID NO: 1071846 - DNA, 33 bp, Homo sapien
tgctatggtttttgatgagtgtgcaatggcaag

SEQ ID NO: 1071847 - DNA, 33 bp, Homo sapien
gtagtcttattattaaacgttcatcctcccttt

SEQ ID NO: 1071848 - DNA, 33 bp, Homo sapien
gtagtcttattattaagcgttcatcctcccttt

SEQ ID NO: 1071849 - DNA, 33 bp, Homo sapien
gatgaattgacacatacggagctcatagatgag

SEQ ID NO: 1071850 - DNA, 33 bp, Homo sapien
gatgaattgacacatatggagctcatagatgag

SEQ ID NO: 1071851 - DNA, 33 bp, Homo sapien
aagatcttctgccttacaatccaaaaaattctt

SEQ ID NO: 1071852 - DNA, 33 bp, Homo sapien
aagatcttctgccttataatccaaaaaattctt

SEQ ID NO: 1071853 - DNA, 33 bp, Homo sapien
gactccatttgtcttgaagaaactaagggaaat

SEQ ID NO: 1071854 - DNA, 33 bp, Homo sapien
gactccatttgtcttggagaaactaagggaaat

SEQ ID NO: 1071855 - DNA, 33 bp, Homo sapien
agctccataaaatgcaacaagctgaggaagtat

SEQ ID NO: 1071856 - DNA, 33 bp, Homo sapien
agctccataaaatgcagcaagctgaggaagtat

SEQ ID NO: 1071857 - DNA, 33 bp, Homo sapien
attaaatgataatcaacgaaggtatttacaaca

SEQ ID NO: 1071858 - DNA, 33 bp, Homo sapien
attaaatgataatcaatgaaggtatttacaaca

SEQ ID NO: 1071859 - DNA, 33 bp, Homo sapien
atcagattgactataccggtactgcagtgcttg

SEQ ID NO: 1071860 - DNA, 33 bp, Homo sapien
atcagattgactatactggtactgcagtgcttg

SEQ ID NO: 1071861 - DNA, 33 bp, Homo sapien
tttctggctgttgtaaaccacttagattttgaa

SEQ ID NO: 1071862 - DNA, 33 bp, Homo sapien
tttctggctgttgtaagccacttagattttgaa

SEQ ID NO: 1071863 - DNA, 33 bp, Homo sapien
gtcacatgacttacacaaactggagggcatagt

SEQ ID NO: 1071864 - DNA, 33 bp, Homo sapien
gtcacatgacttacaccaactggagggcatagt

SEQ ID NO: 1071865 - DNA, 33 bp, Homo sapien
gccaaacagaatagtaaaagtcttttgatcata

SEQ ID NO: 1071866 - DNA, 33 bp, Homo sapien
gccaaacagaatagtagaagtcttttgatcata

SEQ ID NO: 1071867 - DNA, 33 bp, Homo sapien
actcattagattggcaaaaagcttatagtagga

SEQ ID NO: 1071868 - DNA, 33 bp, Homo sapien
actcattagattggcagaaagcttatagtagga

SEQ ID NO: 1071869 - DNA, 33 bp, Homo sapien
atgtaagatgtgccatcatcctccttgatttct

SEQ ID NO: 1071870 - DNA, 33 bp, Homo sapien
atgtaagatgtgccattatcctccttgatttct

SEQ ID NO: 1071871 - DNA, 33 bp, Homo sapien
ccccttagccttctgacgtaattgcaggtttcc

SEQ ID NO: 1071872 - DNA, 33 bp, Homo sapien
ccccttagccttctgatgtaattgcaggtttcc

SEQ ID NO: 1071873 - DNA, 33 bp, Homo sapien
atccaggataagacataaatgcagatttttatg

SEQ ID NO: 1071874 - DNA, 33 bp, Homo sapien
atccaggataagacatcaatgcagatttttatg

SEQ ID NO: 1071875 - DNA, 33 bp, Homo sapien
cagtaagtcacctaacagtctccagaaacaata

SEQ ID NO: 1071876 - DNA, 33 bp, Homo sapien
cagtaagtcacctaacggtctccagaaacaata

SEQ ID NO: 1071877 - DNA, 33 bp, Homo sapien
aaaaatatgacaagccaaatcataatgtagcct

SEQ ID NO: 1071878 - DNA, 33 bp, Homo sapien
aaaaatatgacaagcccaatcataatgtagcct

SEQ ID NO: 1071879 - DNA, 33 bp, Homo sapien
tattaacttagcttcaatagctacaaaatatac

SEQ ID NO: 1071880 - DNA, 33 bp, Homo sapien
tattaacttagcttcagtagctacaaaatatac

SEQ ID NO: 1071881 - DNA, 33 bp, Homo sapien
tgaacctctgaaccagaaattctttgttccaca

SEQ ID NO: 1071882 - DNA, 33 bp, Homo sapien
tgaacctctgaaccaggaattctttgttccaca

SEQ ID NO: 1071883 - DNA, 33 bp, Homo sapien
tttgtatccagaaacaataccaaagttgtatat

SEQ ID NO: 1071884 - DNA, 33 bp, Homo sapien
tttgtatccagaaacattaccaaagttgtatat

SEQ ID NO: 1071885 - DNA, 33 bp, Homo sapien
gtttatccttacgccaatgctacattttctata

SEQ ID NO: 1071886 - DNA, 33 bp, Homo sapien
gtttatccttacgccagtgctacattttctata

SEQ ID NO: 1071887 - DNA, 33 bp, Homo sapien
gattacaaatgttactcagaaaaattagctgta

SEQ ID NO: 1071888 - DNA, 33 bp, Homo sapien
gattacaaatgttacttagaaaaattagctgta

SEQ ID NO: 1071889 - DNA, 33 bp, Homo sapien
gggtacgtttcaaaagcctgtgttaaacagtag

SEQ ID NO: 1071890 - DNA, 33 bp, Homo sapien
gggtacgtttcaaaaggctgtgttaaacagtag

SEQ ID NO: 1071891 - DNA, 33 bp, Homo sapien
aagactatttgcaacaataaaataatttgtgtc

SEQ ID NO: 1071892 - DNA, 33 bp, Homo sapien
aagactatttgcaacagtaaaataatttgtgtc

SEQ ID NO: 1071893 - DNA, 33 bp, Homo sapien
cagcccactctaaacaatgctttattgctttat

SEQ ID NO: 1071894 - DNA, 33 bp, Homo sapien
cagcccactctaaacagtgctttattgctttat

SEQ ID NO: 1071895 - DNA, 33 bp, Homo sapien
tcaggaaatgccaccccaaaatatacaactttg

SEQ ID NO: 1071896 - DNA, 33 bp, Homo sapien
tcaggaaatgccacccgaaaatatacaactttg

SEQ ID NO: 1071897 - DNA, 33 bp, Homo sapien
tttttttaaactacataacatgataatctttat

SEQ ID NO: 1071898 - DNA, 33 bp, Homo sapien
tttttttaaactacatgacatgataatctttat

SEQ ID NO: 1071899 - DNA, 33 bp, Homo sapien
taattcaaaacaaagcgattggagtgcctgagt

SEQ ID NO: 1071900 - DNA, 33 bp, Homo sapien
taattcaaaacaaagctattggagtgcctgagt

SEQ ID NO: 1071901 - DNA, 33 bp, Homo sapien
tggaagtaacagagaaataagcagagtagaaat

SEQ ID NO: 1071902 - DNA, 33 bp, Homo sapien
tggaagtaacagagaagtaagcagagtagaaat

SEQ ID NO: 1071903 - DNA, 33 bp, Homo sapien
cccggccgatactttaaagacttttgtgtgatg

SEQ ID NO: 1071904 - DNA, 33 bp, Homo sapien
cccggccgatactttagagacttttgtgtgatg

SEQ ID NO: 1071905 - DNA, 33 bp, Homo sapien
aacccccaataaatatcagctactgtcattatt

SEQ ID NO: 1071906 - DNA, 33 bp, Homo sapien
aacccccaataaatattagctactgtcattatt

SEQ ID NO: 1071907 - DNA, 33 bp, Homo sapien
gaaagaatttgatccaatgccttcagtacttac

SEQ ID NO: 1071908 - DNA, 33 bp, Homo sapien
gaaagaatttgatccagtgccttcagtacttac

SEQ ID NO: 1071909 - DNA, 33 bp, Homo sapien
gtaccttctggccaaaacgcaatgaaatacatg

SEQ ID NO: 1071910 - DNA, 33 bp, Homo sapien
gtaccttctggccaaagcgcaatgaaatacatg

SEQ ID NO: 1071911 - DNA, 33 bp, Homo sapien
aatgtcaagtaggaaactgcacataggaatatg

SEQ ID NO: 1071912 - DNA, 33 bp, Homo sapien
aatgtcaagtaggaaattgcacataggaatatg

SEQ ID NO: 1071913 - DNA, 33 bp, Homo sapien
caccgagtgtttattaagcagtcactctctgct

SEQ ID NO: 1071914 - DNA, 33 bp, Homo sapien
caccgagtgtttattacgcagtcactctctgct

SEQ ID NO: 1071915 - DNA, 33 bp, Homo sapien
aacattgatttggaaaagtgccataaatatttc

SEQ ID NO: 1071916 - DNA, 33 bp, Homo sapien
aacattgatttggaaaggtgccataaatatttc

SEQ ID NO: 1071917 - DNA, 33 bp, Homo sapien
ggataaatttttaaaactaggcaatcaaaaaaa

SEQ ID NO: 1071918 - DNA, 33 bp, Homo sapien
ggataaatttttaaaagtaggcaatcaaaaaaa

SEQ ID NO: 1071919 - DNA, 33 bp, Homo sapien
tgttatcgtgcaagaacagttgggtagtaagta

SEQ ID NO: 1071920 - DNA, 33 bp, Homo sapien
tgttatcgtgcaagaatagttgggtagtaagta

SEQ ID NO: 1071921 - DNA, 33 bp, Homo sapien
ctatggtaaaactacacaagaagtcatttctta

SEQ ID NO: 1071922 - DNA, 33 bp, Homo sapien
ctatggtaaaactacagaagaagtcatttctta

SEQ ID NO: 1071923 - DNA, 33 bp, Homo sapien
aaggagttatatgggaggatctaaaagtgatct

SEQ ID NO: 1071924 - DNA, 33 bp, Homo sapien
aaggagttatatgggatgatctaaaagtgatct

SEQ ID NO: 1071925 - DNA, 33 bp, Homo sapien
aaatgtagcttcagaactcaggtgataaaaatg

SEQ ID NO: 1071926 - DNA, 33 bp, Homo sapien
aaatgtagcttcagaattcaggtgataaaaatg

SEQ ID NO: 1071927 - DNA, 33 bp, Homo sapien
taatctctttctcttgcatttagccgaattcaa

SEQ ID NO: 1071928 - DNA, 33 bp, Homo sapien
taatctctttctcttggatttagccgaattcaa

SEQ ID NO: 1071929 - DNA, 33 bp, Homo sapien
atacagaatagtttcactaaaaatccaccgtgt

SEQ ID NO: 1071930 - DNA, 33 bp, Homo sapien
atacagaatagtttcagtaaaaatccaccgtgt

SEQ ID NO: 1071931 - DNA, 33 bp, Homo sapien
acataacccaatctcaaaaggctgtataccata

SEQ ID NO: 1071932 - DNA, 33 bp, Homo sapien
acataacccaatctcagaaggctgtataccata

SEQ ID NO: 1071933 - DNA, 33 bp, Homo sapien
aacaagaaatgagctacgaaggcacgatgaaac

SEQ ID NO: 1071934 - DNA, 33 bp, Homo sapien
aacaagaaatgagctatgaaggcacgatgaaac

SEQ ID NO: 1071935 - DNA, 33 bp, Homo sapien
gatgctccatgcaacaatggacaattacactga

SEQ ID NO: 1071936 - DNA, 33 bp, Homo sapien
gatgctccatgcaacagtggacaattacactga

SEQ ID NO: 1071937 - DNA, 33 bp, Homo sapien
gaagaaatgcagaaggacctctcataacagaca

SEQ ID NO: 1071938 - DNA, 33 bp, Homo sapien
gaagaaatgcagaagggcctctcataacagaca

SEQ ID NO: 1071939 - DNA, 33 bp, Homo sapien
atttaaaataattgaactgatggtgatagagtg

SEQ ID NO: 1071940 - DNA, 33 bp, Homo sapien
atttaaaataattgaattgatggtgatagagtg

SEQ ID NO: 1071941 - DNA, 33 bp, Homo sapien
agcagatttgtttccactgaacaccattgtttt

SEQ ID NO: 1071942 - DNA, 33 bp, Homo sapien
agcagatttgtttccattgaacaccattgtttt

SEQ ID NO: 1071943 - DNA, 33 bp, Homo sapien
attgggaataccctgggactaattatctcagtg

SEQ ID NO: 1071944 - DNA, 33 bp, Homo sapien
attgggaataccctggtactaattatctcagtg

SEQ ID NO: 1071945 - DNA, 33 bp, Homo sapien
cctacaatatgttgcactatccctcccacccac

SEQ ID NO: 1071946 - DNA, 33 bp, Homo sapien
cctacaatatgttgcattatccctcccacccac

SEQ ID NO: 1071947 - DNA, 33 bp, Homo sapien
tttgttgactttcatacgtttgaggagtactga

SEQ ID NO: 1071948 - DNA, 33 bp, Homo sapien
tttgttgactttcatatgtttgaggagtactga

SEQ ID NO: 1071949 - DNA, 33 bp, Homo sapien
ctagcacaaccaagggaagtctaaagatacatg

SEQ ID NO: 1071950 - DNA, 33 bp, Homo sapien
ctagcacaaccaaggggagtctaaagatacatg

SEQ ID NO: 1071951 - DNA, 33 bp, Homo sapien
atgactttctcagatgcaacaccaaaagtacca

SEQ ID NO: 1071952 - DNA, 33 bp, Homo sapien
atgactttctcagatggaacaccaaaagtacca

SEQ ID NO: 1071953 - DNA, 33 bp, Homo sapien
acacagaattgtttcaccatcttagatctcctg

SEQ ID NO: 1071954 - DNA, 33 bp, Homo sapien
acacagaattgtttcagcatcttagatctcctg

SEQ ID NO: 1071955 - DNA, 33 bp, Homo sapien
acattgttaattgtgcaaacttctgagtaagag

SEQ ID NO: 1071956 - DNA, 33 bp, Homo sapien
acattgttaattgtgcgaacttctgagtaagag

SEQ ID NO: 1071957 - DNA, 33 bp, Homo sapien
tatatggtgggtatgacgtggaatacttgggaa

SEQ ID NO: 1071958 - DNA, 33 bp, Homo sapien
tatatggtgggtatgatgtggaatacttgggaa

SEQ ID NO: 1071959 - DNA, 33 bp, Homo sapien
gtttagctatccatagacggcttatgatagctc

SEQ ID NO: 1071960 - DNA, 33 bp, Homo sapien
gtttagctatccataggcggcttatgatagctc

SEQ ID NO: 1071961 - DNA, 33 bp, Homo sapien
tctgtagtcagaacaacgttaccctgtcatgct

SEQ ID NO: 1071962 - DNA, 33 bp, Homo sapien
tctgtagtcagaacaatgttaccctgtcatgct

SEQ ID NO: 1071963 - DNA, 33 bp, Homo sapien
aaaatagatggttgagaattattttaagaagag

SEQ ID NO: 1071964 - DNA, 33 bp, Homo sapien
aaaatagatggttgagtattattttaagaagag

SEQ ID NO: 1071965 - DNA, 33 bp, Homo sapien
aatttgatctctttgactatttctcttctttcc

SEQ ID NO: 1071966 - DNA, 33 bp, Homo sapien
aatttgatctctttgagtatttctcttctttcc

SEQ ID NO: 1071967 - DNA, 33 bp, Homo sapien
aagctctctttcataccccctgccaatacatcc

SEQ ID NO: 1071968 - DNA, 33 bp, Homo sapien
aagctctctttcatactccctgccaatacatcc

SEQ ID NO: 1071969 - DNA, 33 bp, Homo sapien
ctgatgcactttgctacagaaagtaataacaat

SEQ ID NO: 1071970 - DNA, 33 bp, Homo sapien
ctgatgcactttgctagagaaagtaataacaat

SEQ ID NO: 1071971 - DNA, 33 bp, Homo sapien
aggactagagaagtcacggatgaatcctgagaa

SEQ ID NO: 1071972 - DNA, 33 bp, Homo sapien
aggactagagaagtcatggatgaatcctgagaa

SEQ ID NO: 1071973 - DNA, 33 bp, Homo sapien
ctcacctggataaacaacctgtcttgccccacc

SEQ ID NO: 1071974 - DNA, 33 bp, Homo sapien
ctcacctggataaacagcctgtcttgccccacc

SEQ ID NO: 1071975 - DNA, 33 bp, Homo sapien
acaaggtctgtgggagcaacagaatgctcaatg

SEQ ID NO: 1071976 - DNA, 33 bp, Homo sapien
acaaggtctgtgggagtaacagaatgctcaatg

SEQ ID NO: 1071977 - DNA, 33 bp, Homo sapien
aaaatctgatctaaggaaaactaatcatactac

SEQ ID NO: 1071978 - DNA, 33 bp, Homo sapien
aaaatctgatctaagggaaactaatcatactac

SEQ ID NO: 1071979 - DNA, 33 bp, Homo sapien
cgcctgaaaagataaaattcacaacatctagta

SEQ ID NO: 1071980 - DNA, 33 bp, Homo sapien
cgcctgaaaagataaacttcacaacatctagta

SEQ ID NO: 1071981 - DNA, 33 bp, Homo sapien
ggagctacatccttcaccttttttggtcagtgt

SEQ ID NO: 1071982 - DNA, 33 bp, Homo sapien
ggagctacatccttcagcttttttggtcagtgt

SEQ ID NO: 1071983 - DNA, 33 bp, Homo sapien
tcagagtcttcatcaggaaatggctataattct

SEQ ID NO: 1071984 - DNA, 33 bp, Homo sapien
tcagagtcttcatcagtaaatggctataattct

SEQ ID NO: 1071985 - DNA, 33 bp, Homo sapien
acatttagaaatggacactttgcagtaaacaac

SEQ ID NO: 1071986 - DNA, 33 bp, Homo sapien
acatttagaaatggacgctttgcagtaaacaac

SEQ ID NO: 1071987 - DNA, 33 bp, Homo sapien
tttctcttacagcaccagaactttatgataaca

SEQ ID NO: 1071988 - DNA, 33 bp, Homo sapien
tttctcttacagcaccggaactttatgataaca

SEQ ID NO: 1071989 - DNA, 33 bp, Homo sapien
tcaatgcctagagatacgtattctccttttttc

SEQ ID NO: 1071990 - DNA, 33 bp, Homo sapien
tcaatgcctagagatatgtattctccttttttc

SEQ ID NO: 1071991 - DNA, 33 bp, Homo sapien
cgaaaaaacacatagagagacttgctcaataca

SEQ ID NO: 1071992 - DNA, 33 bp, Homo sapien
cgaaaaaacacatagatagacttgctcaataca

SEQ ID NO: 1071993 - DNA, 33 bp, Homo sapien
gaaaagttggaaaatcaatatttggttcataaa

SEQ ID NO: 1071994 - DNA, 33 bp, Homo sapien
gaaaagttggaaaatcgatatttggttcataaa

SEQ ID NO: 1071995 - DNA, 33 bp, Homo sapien
gaagccctctaagtgccgaggaacacagaaagc

SEQ ID NO: 1071996 - DNA, 33 bp, Homo sapien
gaagccctctaagtgctgaggaacacagaaagc

SEQ ID NO: 1071997 - DNA, 33 bp, Homo sapien
cataaatgcatgaaccaatttcttgaagagatc

SEQ ID NO: 1071998 - DNA, 33 bp, Homo sapien
cataaatgcatgaaccgatttcttgaagagatc

SEQ ID NO: 1071999 - DNA, 33 bp, Homo sapien
tgagaagtttgacataagtatttttttcatcat

SEQ ID NO: 1072000 - DNA, 33 bp, Homo sapien
tgagaagtttgacatacgtatttttttcatcat

SEQ ID NO: 1072001 - DNA, 33 bp, Homo sapien
tatactccatttagtccattgttccatggttat

SEQ ID NO: 1072002 - DNA, 33 bp, Homo sapien
tatactccatttagtctattgttccatggttat

SEQ ID NO: 1072003 - DNA, 33 bp, Homo sapien
gagagaaagagggaaaaatggcaaacacaagaa

SEQ ID NO: 1072004 - DNA, 33 bp, Homo sapien
gagagaaagagggaaagatggcaaacacaagaa

SEQ ID NO: 1072005 - DNA, 33 bp, Homo sapien
acagagagcttcttccagcaaataaggattaga

SEQ ID NO: 1072006 - DNA, 33 bp, Homo sapien
acagagagcttcttccggcaaataaggattaga

SEQ ID NO: 1072007 - DNA, 33 bp, Homo sapien
ccagctgtgtccaaaacggatggttgtatttct

SEQ ID NO: 1072008 - DNA, 33 bp, Homo sapien
ccagctgtgtccaaaatggatggttgtatttct

SEQ ID NO: 1072009 - DNA, 33 bp, Homo sapien
tgagaaggagccagggaaagaattatggtaaca

SEQ ID NO: 1072010 - DNA, 33 bp, Homo sapien
tgagaaggagccagggcaagaattatggtaaca

SEQ ID NO: 1072011 - DNA, 33 bp, Homo sapien
aattcaaatcaatatgacaatgaaataccatct

SEQ ID NO: 1072012 - DNA, 33 bp, Homo sapien
aattcaaatcaatatggcaatgaaataccatct

SEQ ID NO: 1072013 - DNA, 33 bp, Homo sapien
ataaagataaagctgcccttgtttcactctaat

SEQ ID NO: 1072014 - DNA, 33 bp, Homo sapien
ataaagataaagctgctcttgtttcactctaat

SEQ ID NO: 1072015 - DNA, 33 bp, Homo sapien
atgtgaaatgaaattcacaaaccaaagaaaaaa

SEQ ID NO: 1072016 - DNA, 33 bp, Homo sapien
atgtgaaatgaaattcgcaaaccaaagaaaaaa

SEQ ID NO: 1072017 - DNA, 33 bp, Homo sapien
cattttgtgtgacttacaataactgagcacaca

SEQ ID NO: 1072018 - DNA, 33 bp, Homo sapien
cattttgtgtgacttataataactgagcacaca

SEQ ID NO: 1072019 - DNA, 33 bp, Homo sapien
cttgtgatcaattaaactagcaccaacccagtc

SEQ ID NO: 1072020 - DNA, 33 bp, Homo sapien
cttgtgatcaattaaagtagcaccaacccagtc

SEQ ID NO: 1072021 - DNA, 33 bp, Homo sapien
aggtagtgtggagttacaatagacaagaactga

SEQ ID NO: 1072022 - DNA, 33 bp, Homo sapien
aggtagtgtggagttataatagacaagaactga

SEQ ID NO: 1072023 - DNA, 33 bp, Homo sapien
gcataaggtagcttaccagagtagaactgtttg

SEQ ID NO: 1072024 - DNA, 33 bp, Homo sapien
gcataaggtagcttactagagtagaactgtttg

SEQ ID NO: 1072025 - DNA, 33 bp, Homo sapien
atcatcctatgaacacactcgctatatacaaaa

SEQ ID NO: 1072026 - DNA, 33 bp, Homo sapien
atcatcctatgaacacgctcgctatatacaaaa

SEQ ID NO: 1072027 - DNA, 33 bp, Homo sapien
ggaaaataatatgaaaaaggagccactggtccc

SEQ ID NO: 1072028 - DNA, 33 bp, Homo sapien
ggaaaataatatgaaagaggagccactggtccc

SEQ ID NO: 1072029 - DNA, 33 bp, Homo sapien
cattctcatctcccaaaggtgctttaaaggcat

SEQ ID NO: 1072030 - DNA, 33 bp, Homo sapien
cattctcatctcccaagggtgctttaaaggcat

SEQ ID NO: 1072031 - DNA, 33 bp, Homo sapien
aagagacatatcatacaaaggcccatgacttcc

SEQ ID NO: 1072032 - DNA, 33 bp, Homo sapien
aagagacatatcatacgaaggcccatgacttcc

SEQ ID NO: 1072033 - DNA, 33 bp, Homo sapien
cacagattttcatccaatgctcataaagaatat

SEQ ID NO: 1072034 - DNA, 33 bp, Homo sapien
cacagattttcatccattgctcataaagaatat

SEQ ID NO: 1072035 - DNA, 33 bp, Homo sapien
acacacgtctgtaaaacatatctgaccttgaca

SEQ ID NO: 1072036 - DNA, 33 bp, Homo sapien
acacacgtctgtaaaatatatctgaccttgaca

SEQ ID NO: 1072037 - DNA, 33 bp, Homo sapien
cctctcccacttaataagatatgttttgtaaag

SEQ ID NO: 1072038 - DNA, 33 bp, Homo sapien
cctctcccacttaataggatatgttttgtaaag

SEQ ID NO: 1072039 - DNA, 33 bp, Homo sapien
actccctcatccaaaacgcagaggcaggtacca

SEQ ID NO: 1072040 - DNA, 33 bp, Homo sapien
actccctcatccaaaatgcagaggcaggtacca

SEQ ID NO: 1072041 - DNA, 33 bp, Homo sapien
attctcttaggaataactactgtgaatgtggat

SEQ ID NO: 1072042 - DNA, 33 bp, Homo sapien
attctcttaggaataagtactgtgaatgtggat

SEQ ID NO: 1072043 - DNA, 33 bp, Homo sapien
tctatttttgcacttacggtcaacaaagtatgg

SEQ ID NO: 1072044 - DNA, 33 bp, Homo sapien
tctatttttgcacttatggtcaacaaagtatgg

SEQ ID NO: 1072045 - DNA, 33 bp, Homo sapien
gaacttgtggttagcacgtttttattgttcatt

SEQ ID NO: 1072046 - DNA, 33 bp, Homo sapien
gaacttgtggttagcatgtttttattgttcatt

SEQ ID NO: 1072047 - DNA, 33 bp, Homo sapien
tcagatcatagtgaaaatcgtattgggagaaag

SEQ ID NO: 1072048 - DNA, 33 bp, Homo sapien
tcagatcatagtgaaagtcgtattgggagaaag

SEQ ID NO: 1072049 - DNA, 33 bp, Homo sapien
aggaatttcatcatagcacacgtggatgctgat

SEQ ID NO: 1072050 - DNA, 33 bp, Homo sapien
aggaatttcatcatagtacacgtggatgctgat

SEQ ID NO: 1072051 - DNA, 33 bp, Homo sapien
tacctgagtttcagaaaatggtaacctgaattc

SEQ ID NO: 1072052 - DNA, 33 bp, Homo sapien
tacctgagtttcagaagatggtaacctgaattc

SEQ ID NO: 1072053 - DNA, 33 bp, Homo sapien
tggtggtgaccaaacacataggaaaagttaatt

SEQ ID NO: 1072054 - DNA, 33 bp, Homo sapien
tggtggtgaccaaacatataggaaaagttaatt

SEQ ID NO: 1072055 - DNA, 33 bp, Homo sapien
caaaaagtaaatgtgtcaaccaacggagaaagc

SEQ ID NO: 1072056 - DNA, 33 bp, Homo sapien
caaaaagtaaatgtgtgaaccaacggagaaagc

SEQ ID NO: 1072057 - DNA, 33 bp, Homo sapien
aatcaatgccatgaaaaggtcaataatactgta

SEQ ID NO: 1072058 - DNA, 33 bp, Homo sapien
aatcaatgccatgaaagggtcaataatactgta

SEQ ID NO: 1072059 - DNA, 33 bp, Homo sapien
ctgtttaaatgaaagacggcatagtttatctta

SEQ ID NO: 1072060 - DNA, 33 bp, Homo sapien
ctgtttaaatgaaagatggcatagtttatctta

SEQ ID NO: 1072061 - DNA, 33 bp, Homo sapien
aatttctccagccatacttgggtaacagaatta

SEQ ID NO: 1072062 - DNA, 33 bp, Homo sapien
aatttctccagccatatttgggtaacagaatta

SEQ ID NO: 1072063 - DNA, 33 bp, Homo sapien
tgagcctgacggtggcaaggtcaactcagaatt

SEQ ID NO: 1072064 - DNA, 33 bp, Homo sapien
tgagcctgacggtggctaggtcaactcagaatt

SEQ ID NO: 1072065 - DNA, 33 bp, Homo sapien
atatcaaggcaaaagactagagagtgacataaa

SEQ ID NO: 1072066 - DNA, 33 bp, Homo sapien
atatcaaggcaaaagattagagagtgacataaa

SEQ ID NO: 1072067 - DNA, 33 bp, Homo sapien
tagctgtacctgaaaccgaactgtgttcctctt

SEQ ID NO: 1072068 - DNA, 33 bp, Homo sapien
tagctgtacctgaaactgaactgtgttcctctt

SEQ ID NO: 1072069 - DNA, 33 bp, Homo sapien
aaattacacagggcacaagggtatatatgtgga

SEQ ID NO: 1072070 - DNA, 33 bp, Homo sapien
aaattacacagggcacgagggtatatatgtgga

SEQ ID NO: 1072071 - DNA, 33 bp, Homo sapien
aataaagtgatattaactaagcacaattaaaaa

SEQ ID NO: 1072072 - DNA, 33 bp, Homo sapien
aataaagtgatattaagtaagcacaattaaaaa

SEQ ID NO: 1072073 - DNA, 33 bp, Homo sapien
caccttaaagtccaaactgacctgtgtttcacc

SEQ ID NO: 1072074 - DNA, 33 bp, Homo sapien
caccttaaagtccaaagtgacctgtgtttcacc

SEQ ID NO: 1072075 - DNA, 33 bp, Homo sapien
ttcttggttagtctcacgtgagtttctgaaagt

SEQ ID NO: 1072076 - DNA, 33 bp, Homo sapien
ttcttggttagtctcaggtgagtttctgaaagt

SEQ ID NO: 1072077 - DNA, 33 bp, Homo sapien
aaaggctctccagttaacaagtgatgaatgctg

SEQ ID NO: 1072078 - DNA, 33 bp, Homo sapien
aaaggctctccagttagcaagtgatgaatgctg

SEQ ID NO: 1072079 - DNA, 33 bp, Homo sapien
atttgtttgtacaacagcaagttattgcctact

SEQ ID NO: 1072080 - DNA, 33 bp, Homo sapien
atttgtttgtacaacatcaagttattgcctact

SEQ ID NO: 1072081 - DNA, 33 bp, Homo sapien
gtctgtgacagtaacaacacaatagaggaagtg

SEQ ID NO: 1072082 - DNA, 33 bp, Homo sapien
gtctgtgacagtaacagcacaatagaggaagtg

SEQ ID NO: 1072083 - DNA, 33 bp, Homo sapien
gctattttaacccacaagtcagctggcaagtca

SEQ ID NO: 1072084 - DNA, 33 bp, Homo sapien
gctattttaacccacacgtcagctggcaagtca

SEQ ID NO: 1072085 - DNA, 33 bp, Homo sapien
tgaggtccatgcctgacaacgtgctttatctct

SEQ ID NO: 1072086 - DNA, 33 bp, Homo sapien
tgaggtccatgcctgagaacgtgctttatctct

SEQ ID NO: 1072087 - DNA, 33 bp, Homo sapien
tatttgatttcacaaaataactgttttctaatt

SEQ ID NO: 1072088 - DNA, 33 bp, Homo sapien
tatttgatttcacaaagtaactgttttctaatt

SEQ ID NO: 1072089 - DNA, 33 bp, Homo sapien
aagataaacctgctaccagtgaatgaaatgaaa

SEQ ID NO: 1072090 - DNA, 33 bp, Homo sapien
aagataaacctgctacgagtgaatgaaatgaaa

SEQ ID NO: 1072091 - DNA, 33 bp, Homo sapien
ggttattatgcaatgacggtttgtctttatatt

SEQ ID NO: 1072092 - DNA, 33 bp, Homo sapien
ggttattatgcaatgatggtttgtctttatatt

SEQ ID NO: 1072093 - DNA, 33 bp, Homo sapien
ttttgaagaaaatatacgtgcaaaagtatgaca

SEQ ID NO: 1072094 - DNA, 33 bp, Homo sapien
ttttgaagaaaatatatgtgcaaaagtatgaca

SEQ ID NO: 1072095 - DNA, 33 bp, Homo sapien
aagggaacattttggactacataactgtgatac

SEQ ID NO: 1072096 - DNA, 33 bp, Homo sapien
aagggaacattttggagtacataactgtgatac

SEQ ID NO: 1072097 - DNA, 33 bp, Homo sapien
ccatgttagtaacgccagaaatcagtcatatac

SEQ ID NO: 1072098 - DNA, 33 bp, Homo sapien
ccatgttagtaacgccggaaatcagtcatatac

SEQ ID NO: 1072099 - DNA, 33 bp, Homo sapien
caccaggtcaagcccacgtatatgactgatttc

SEQ ID NO: 1072100 - DNA, 33 bp, Homo sapien
caccaggtcaagcccatgtatatgactgatttc

SEQ ID NO: 1072101 - DNA, 33 bp, Homo sapien
gctattgcttctaaaccgtgaaatagttgtgat

SEQ ID NO: 1072102 - DNA, 33 bp, Homo sapien
gctattgcttctaaacggtgaaatagttgtgat

SEQ ID NO: 1072103 - DNA, 33 bp, Homo sapien
cttgccatcagaatgaccttattttcttttttt

SEQ ID NO: 1072104 - DNA, 33 bp, Homo sapien
cttgccatcagaatgagcttattttcttttttt

SEQ ID NO: 1072105 - DNA, 33 bp, Homo sapien
gttttggagcccttaaaaaacttcaaagcagtc

SEQ ID NO: 1072106 - DNA, 33 bp, Homo sapien
gttttggagcccttaagaaacttcaaagcagtc

SEQ ID NO: 1072107 - DNA, 33 bp, Homo sapien
gtacttcacttgtatgcatcaccagtcatgggc

SEQ ID NO: 1072108 - DNA, 33 bp, Homo sapien
gtacttcacttgtatgtatcaccagtcatgggc

SEQ ID NO: 1072109 - DNA, 33 bp, Homo sapien
actaatctgtaaaacaatctagtcctggtcttt

SEQ ID NO: 1072110 - DNA, 33 bp, Homo sapien
actaatctgtaaaacagtctagtcctggtcttt

SEQ ID NO: 1072111 - DNA, 33 bp, Homo sapien
ctagaaaaagctgggtaaaaacaatgaaaaaaa

SEQ ID NO: 1072112 - DNA, 33 bp, Homo sapien
ctagaaaaagctgggtgaaaacaatgaaaaaaa

SEQ ID NO: 1072113 - DNA, 33 bp, Homo sapien
gaccttgccataaaaccgttgcttgtctctgtt

SEQ ID NO: 1072114 - DNA, 33 bp, Homo sapien
gaccttgccataaaactgttgcttgtctctgtt

SEQ ID NO: 1072115 - DNA, 33 bp, Homo sapien
ttgatccctacttctcactcctctatcctctct

SEQ ID NO: 1072116 - DNA, 33 bp, Homo sapien
ttgatccctacttctcgctcctctatcctctct

SEQ ID NO: 1072117 - DNA, 33 bp, Homo sapien
cttcaataaggctgacaaaaaaaacaaaacaat

SEQ ID NO: 1072118 - DNA, 33 bp, Homo sapien
cttcaataaggctgacgaaaaaaacaaaacaat

SEQ ID NO: 1072119 - DNA, 33 bp, Homo sapien
ttattacgttatactacgtttcacgcatataat

SEQ ID NO: 1072120 - DNA, 33 bp, Homo sapien
ttattacgttatactatgtttcacgcatataat

SEQ ID NO: 1072121 - DNA, 33 bp, Homo sapien
gcccataacccatatcgattctcctaacctcac

SEQ ID NO: 1072122 - DNA, 33 bp, Homo sapien
gcccataacccatatctattctcctaacctcac

SEQ ID NO: 1072123 - DNA, 33 bp, Homo sapien
caggctcaggcccatgacaatttcttacctatt

SEQ ID NO: 1072124 - DNA, 33 bp, Homo sapien
caggctcaggcccatgccaatttcttacctatt

SEQ ID NO: 1072125 - DNA, 33 bp, Homo sapien
tgcaggggagggcatgaatagatagaactgcat

SEQ ID NO: 1072126 - DNA, 33 bp, Homo sapien
tgcaggggagggcatggatagatagaactgcat

SEQ ID NO: 1072127 - DNA, 33 bp, Homo sapien
ttgactagagcatttacgtgatacttgactctt

SEQ ID NO: 1072128 - DNA, 33 bp, Homo sapien
ttgactagagcatttatgtgatacttgactctt

SEQ ID NO: 1072129 - DNA, 33 bp, Homo sapien
gggaacaaaacatgaaatctatgtatctgcatc

SEQ ID NO: 1072130 - DNA, 33 bp, Homo sapien
gggaacaaaacatgaagtctatgtatctgcatc

SEQ ID NO: 1072131 - DNA, 33 bp, Homo sapien
tttggtaaaaaaatgaactagaaaggtaaactg

SEQ ID NO: 1072132 - DNA, 33 bp, Homo sapien
tttggtaaaaaaatgatctagaaaggtaaactg

SEQ ID NO: 1072133 - DNA, 33 bp, Homo sapien
aatgaagcagctgcaactgattttttagtaatg

SEQ ID NO: 1072134 - DNA, 33 bp, Homo sapien
aatgaagcagctgcaagtgattttttagtaatg

SEQ ID NO: 1072135 - DNA, 33 bp, Homo sapien
tccccaagtaaacctaggtagaaacagccaatg

SEQ ID NO: 1072136 - DNA, 33 bp, Homo sapien
tccccaagtaaacctatgtagaaacagccaatg

SEQ ID NO: 1072137 - DNA, 33 bp, Homo sapien
atcatgcaatatacccaggaatcaaaccaacac

SEQ ID NO: 1072138 - DNA, 33 bp, Homo sapien
atcatgcaatatacccgggaatcaaaccaacac

SEQ ID NO: 1072139 - DNA, 33 bp, Homo sapien
gagaacttctcaaacccagggaaggatattaat

SEQ ID NO: 1072140 - DNA, 33 bp, Homo sapien
gagaacttctcaaaccgagggaaggatattaat

SEQ ID NO: 1072141 - DNA, 33 bp, Homo sapien
tcatgagtatgtgaagcaacagaactactcatc

SEQ ID NO: 1072142 - DNA, 33 bp, Homo sapien
tcatgagtatgtgaagtaacagaactactcatc

SEQ ID NO: 1072143 - DNA, 33 bp, Homo sapien
tttcacacaaggagccaggaatgccaaggcagc

SEQ ID NO: 1072144 - DNA, 33 bp, Homo sapien
tttcacacaaggagcctggaatgccaaggcagc

SEQ ID NO: 1072145 - DNA, 33 bp, Homo sapien
aagaaatggctagtatcagaaatcttgatttta

SEQ ID NO: 1072146 - DNA, 33 bp, Homo sapien
aagaaatggctagtatgagaaatcttgatttta

SEQ ID NO: 1072147 - DNA, 33 bp, Homo sapien
atatagaaaatgcttacggtggcttcgcggtag

SEQ ID NO: 1072148 - DNA, 33 bp, Homo sapien
atatagaaaatgcttatggtggcttcgcggtag

SEQ ID NO: 1072149 - DNA, 33 bp, Homo sapien
tcatttatttggggtacgtactcagcattaaga

SEQ ID NO: 1072150 - DNA, 33 bp, Homo sapien
tcatttatttggggtaggtactcagcattaaga

SEQ ID NO: 1072151 - DNA, 33 bp, Homo sapien
ggattggaagaattacaattttgaaaatgacca

SEQ ID NO: 1072152 - DNA, 33 bp, Homo sapien
ggattggaagaattactattttgaaaatgacca

SEQ ID NO: 1072153 - DNA, 33 bp, Homo sapien
caaaaatcctaaatgaagtggtagaaaacaaaa

SEQ ID NO: 1072154 - DNA, 33 bp, Homo sapien
caaaaatcctaaatgatgtggtagaaaacaaaa

SEQ ID NO: 1072155 - DNA, 33 bp, Homo sapien
agccaggctatgctgggatttcacactagttat

SEQ ID NO: 1072156 - DNA, 33 bp, Homo sapien
agccaggctatgctggtatttcacactagttat

SEQ ID NO: 1072157 - DNA, 33 bp, Homo sapien
aagtggtgctagaacaactatcatattaaaaaa

SEQ ID NO: 1072158 - DNA, 33 bp, Homo sapien
aagtggtgctagaacagctatcatattaaaaaa

SEQ ID NO: 1072159 - DNA, 33 bp, Homo sapien
cttgagcttttgtaaactgggcattaaaaggta

SEQ ID NO: 1072160 - DNA, 33 bp, Homo sapien
cttgagcttttgtaaattgggcattaaaaggta

SEQ ID NO: 1072161 - DNA, 33 bp, Homo sapien
aattgtttctggtgaaaaacagacttgtcagcc

SEQ ID NO: 1072162 - DNA, 33 bp, Homo sapien
aattgtttctggtgaagaacagacttgtcagcc

SEQ ID NO: 1072163 - DNA, 33 bp, Homo sapien
actcacagtctatctaagtttaatacaaaatta

SEQ ID NO: 1072164 - DNA, 33 bp, Homo sapien
actcacagtctatctatgtttaatacaaaatta

SEQ ID NO: 1072165 - DNA, 33 bp, Homo sapien
ttgaataagtatgacaatgtaagaaggtgaaaa

SEQ ID NO: 1072166 - DNA, 33 bp, Homo sapien
ttgaataagtatgacagtgtaagaaggtgaaaa

SEQ ID NO: 1072167 - DNA, 33 bp, Homo sapien
gtaatgaagcagtcacaaaaagataaacatttc

SEQ ID NO: 1072168 - DNA, 33 bp, Homo sapien
gtaatgaagcagtcacgaaaagataaacatttc

SEQ ID NO: 1072169 - DNA, 33 bp, Homo sapien
aaaatggcaaagaggactaatgaatgatgcatc

SEQ ID NO: 1072170 - DNA, 33 bp, Homo sapien
aaaatggcaaagaggattaatgaatgatgcatc

SEQ ID NO: 1072171 - DNA, 33 bp, Homo sapien
cctgatcccactcaagaacatttttctccccat

SEQ ID NO: 1072172 - DNA, 33 bp, Homo sapien
cctgatcccactcaagcacatttttctccccat

SEQ ID NO: 1072173 - DNA, 33 bp, Homo sapien
tctatagggaaaaaccaaataatctgatcaaaa

SEQ ID NO: 1072174 - DNA, 33 bp, Homo sapien
tctatagggaaaaaccgaataatctgatcaaaa

SEQ ID NO: 1072175 - DNA, 33 bp, Homo sapien
gaatcagaattagcaaagttttaaagactggga

SEQ ID NO: 1072176 - DNA, 33 bp, Homo sapien
gaatcagaattagcaacgttttaaagactggga

SEQ ID NO: 1072177 - DNA, 33 bp, Homo sapien
taggttggcacgtgacagagagagacaccagat

SEQ ID NO: 1072178 - DNA, 33 bp, Homo sapien
taggttggcacgtgacggagagagacaccagat

SEQ ID NO: 1072179 - DNA, 33 bp, Homo sapien
agacagggccttttaacaggcagttgagttaaa

SEQ ID NO: 1072180 - DNA, 33 bp, Homo sapien
agacagggccttttaagaggcagttgagttaaa

SEQ ID NO: 1072181 - DNA, 33 bp, Homo sapien
caatccttcaaagctcagaaagcactttttgta

SEQ ID NO: 1072182 - DNA, 33 bp, Homo sapien
caatccttcaaagctccgaaagcactttttgta

SEQ ID NO: 1072183 - DNA, 33 bp, Homo sapien
tcagtgtaacttcaaccgtaatttagaagctat

SEQ ID NO: 1072184 - DNA, 33 bp, Homo sapien
tcagtgtaacttcaactgtaatttagaagctat

SEQ ID NO: 1072185 - DNA, 33 bp, Homo sapien
tgaattgcaaagaatacgtaacctagtggtagt

SEQ ID NO: 1072186 - DNA, 33 bp, Homo sapien
tgaattgcaaagaatatgtaacctagtggtagt

SEQ ID NO: 1072187 - DNA, 33 bp, Homo sapien
cttccactttctcctaacattttctttggcagc

SEQ ID NO: 1072188 - DNA, 33 bp, Homo sapien
cttccactttctcctatcattttctttggcagc

SEQ ID NO: 1072189 - DNA, 33 bp, Homo sapien
caagggataaggtcaactggtcccaatcttctc

SEQ ID NO: 1072190 - DNA, 33 bp, Homo sapien
caagggataaggtcaagtggtcccaatcttctc

SEQ ID NO: 1072191 - DNA, 33 bp, Homo sapien
gacagaacgatatttaccacgagaaatatttgt

SEQ ID NO: 1072192 - DNA, 33 bp, Homo sapien
gacagaacgatatttatcacgagaaatatttgt

SEQ ID NO: 1072193 - DNA, 33 bp, Homo sapien
atgaaggcctttctctaaagactgcaatatgat

SEQ ID NO: 1072194 - DNA, 33 bp, Homo sapien
atgaaggcctttctctgaagactgcaatatgat

SEQ ID NO: 1072195 - DNA, 33 bp, Homo sapien
gaaaaagagtaaattgcaaagaatgtgctcagt

SEQ ID NO: 1072196 - DNA, 33 bp, Homo sapien
gaaaaagagtaaattgtaaagaatgtgctcagt

SEQ ID NO: 1072197 - DNA, 33 bp, Homo sapien
cctgttgcaattgtaacggataaccacgtttgg

SEQ ID NO: 1072198 - DNA, 33 bp, Homo sapien
cctgttgcaattgtaatggataaccacgtttgg

SEQ ID NO: 1072199 - DNA, 33 bp, Homo sapien
cttacttctcaaatgagataaaaggttcaaatc

SEQ ID NO: 1072200 - DNA, 33 bp, Homo sapien
cttacttctcaaatgatataaaaggttcaaatc

SEQ ID NO: 1072201 - DNA, 33 bp, Homo sapien
ttccatgtccaactgaagttccaactcatccag

SEQ ID NO: 1072202 - DNA, 33 bp, Homo sapien
ttccatgtccaactgaggttccaactcatccag

SEQ ID NO: 1072203 - DNA, 33 bp, Homo sapien
taactgaaatcactacacgtcacaggatgtcaa

SEQ ID NO: 1072204 - DNA, 33 bp, Homo sapien
taactgaaatcactacgcgtcacaggatgtcaa

SEQ ID NO: 1072205 - DNA, 33 bp, Homo sapien
gtttgtgtgataattccacaacttacatggaaa

SEQ ID NO: 1072206 - DNA, 33 bp, Homo sapien
gtttgtgtgataattctacaacttacatggaaa

SEQ ID NO: 1072207 - DNA, 33 bp, Homo sapien
atttttatgttggtgacgttttgatatgcccga

SEQ ID NO: 1072208 - DNA, 33 bp, Homo sapien
atttttatgttggtgatgttttgatatgcccga

SEQ ID NO: 1072209 - DNA, 33 bp, Homo sapien
agagagtatggagataccttgcaatagaaattc

SEQ ID NO: 1072210 - DNA, 33 bp, Homo sapien
agagagtatggagatatcttgcaatagaaattc

SEQ ID NO: 1072211 - DNA, 33 bp, Homo sapien
cagttatatgtcttcccggaagaatctgacctt

SEQ ID NO: 1072212 - DNA, 33 bp, Homo sapien
cagttatatgtcttcctggaagaatctgacctt

SEQ ID NO: 1072213 - DNA, 33 bp, Homo sapien
gttacagcgcttgacaaaaggatgaccacaaac

SEQ ID NO: 1072214 - DNA, 33 bp, Homo sapien
gttacagcgcttgacagaaggatgaccacaaac

SEQ ID NO: 1072215 - DNA, 33 bp, Homo sapien
ttcattcttctgcatacggatattccattttcc

SEQ ID NO: 1072216 - DNA, 33 bp, Homo sapien
ttcattcttctgcatatggatattccattttcc

SEQ ID NO: 1072217 - DNA, 33 bp, Homo sapien
caaaatgctaccagtcgctttgctaaggcattg

SEQ ID NO: 1072218 - DNA, 33 bp, Homo sapien
caaaatgctaccagtctctttgctaaggcattg

SEQ ID NO: 1072219 - DNA, 33 bp, Homo sapien
tgtggtaccttagatacggtggttttcatagag

SEQ ID NO: 1072220 - DNA, 33 bp, Homo sapien
tgtggtaccttagatatggtggttttcatagag

SEQ ID NO: 1072221 - DNA, 33 bp, Homo sapien
ttttattctcatgaagaaggtttctctttctca

SEQ ID NO: 1072222 - DNA, 33 bp, Homo sapien
ttttattctcatgaaggaggtttctctttctca

SEQ ID NO: 1072223 - DNA, 33 bp, Homo sapien
tgttttttcacaaagacagtcaaatttagtcga

SEQ ID NO: 1072224 - DNA, 33 bp, Homo sapien
tgttttttcacaaagatagtcaaatttagtcga

SEQ ID NO: 1072225 - DNA, 33 bp, Homo sapien
atggctgttacaggaaactttcaggtcaccaag

SEQ ID NO: 1072226 - DNA, 33 bp, Homo sapien
atggctgttacaggaagctttcaggtcaccaag

SEQ ID NO: 1072227 - DNA, 33 bp, Homo sapien
atagtccagtggcaaacatccaaatcctgttct

SEQ ID NO: 1072228 - DNA, 33 bp, Homo sapien
atagtccagtggcaaatatccaaatcctgttct

SEQ ID NO: 1072229 - DNA, 33 bp, Homo sapien
ttgagcatacatattacaaatctaaggcctttt

SEQ ID NO: 1072230 - DNA, 33 bp, Homo sapien
ttgagcatacatattagaaatctaaggcctttt

SEQ ID NO: 1072231 - DNA, 33 bp, Homo sapien
ggatgttttcattggtaaaaagtgtaagccatt

SEQ ID NO: 1072232 - DNA, 33 bp, Homo sapien
ggatgttttcattggttaaaagtgtaagccatt

SEQ ID NO: 1072233 - DNA, 33 bp, Homo sapien
gaatgagaaataagacgggggtaaatataaaga

SEQ ID NO: 1072234 - DNA, 33 bp, Homo sapien
gaatgagaaataagactggggtaaatataaaga

SEQ ID NO: 1072235 - DNA, 33 bp, Homo sapien
ttttaagtcactagagcagttgtatattggtat

SEQ ID NO: 1072236 - DNA, 33 bp, Homo sapien
ttttaagtcactagaggagttgtatattggtat

SEQ ID NO: 1072237 - DNA, 33 bp, Homo sapien
cttctttagccatatccatgaaaacagctgaga

SEQ ID NO: 1072238 - DNA, 33 bp, Homo sapien
cttctttagccatatcgatgaaaacagctgaga

SEQ ID NO: 1072239 - DNA, 33 bp, Homo sapien
aactacttgttcttcaagataatatcaaggtta

SEQ ID NO: 1072240 - DNA, 33 bp, Homo sapien
aactacttgttcttcaggataatatcaaggtta

SEQ ID NO: 1072241 - DNA, 33 bp, Homo sapien
acaatctcctcagacaggaaacgttagaaaaaa

SEQ ID NO: 1072242 - DNA, 33 bp, Homo sapien
acaatctcctcagacatgaaacgttagaaaaaa

SEQ ID NO: 1072243 - DNA, 33 bp, Homo sapien
aagctaatttggtatcaattcctaccttatttc

SEQ ID NO: 1072244 - DNA, 33 bp, Homo sapien
aagctaatttggtatcgattcctaccttatttc

SEQ ID NO: 1072245 - DNA, 33 bp, Homo sapien
tttatagtagcagtaaccaacttctaaatctga

SEQ ID NO: 1072246 - DNA, 33 bp, Homo sapien
tttatagtagcagtaatcaacttctaaatctga

SEQ ID NO: 1072247 - DNA, 33 bp, Homo sapien
gatttatgagaatctgaacgcaaacagcgctct

SEQ ID NO: 1072248 - DNA, 33 bp, Homo sapien
gatttatgagaatctggacgcaaacagcgctct

SEQ ID NO: 1072249 - DNA, 33 bp, Homo sapien
atccaagccatatcagccagtgataccacaggt

SEQ ID NO: 1072250 - DNA, 33 bp, Homo sapien
atccaagccatatcagtcagtgataccacaggt

SEQ ID NO: 1072251 - DNA, 33 bp, Homo sapien
atccttatggagcttacacactagtagggagta

SEQ ID NO: 1072252 - DNA, 33 bp, Homo sapien
atccttatggagcttagacactagtagggagta

SEQ ID NO: 1072253 - DNA, 33 bp, Homo sapien
atcccacatcacctccaatagaaacaaagtcaa

SEQ ID NO: 1072254 - DNA, 33 bp, Homo sapien
atcccacatcacctccgatagaaacaaagtcaa

SEQ ID NO: 1072255 - DNA, 33 bp, Homo sapien
gaggcaacagtggaaaaaactgcatcatgtagt

SEQ ID NO: 1072256 - DNA, 33 bp, Homo sapien
gaggcaacagtggaaagaactgcatcatgtagt

SEQ ID NO: 1072257 - DNA, 33 bp, Homo sapien
acacgaaatattgctgacaaccaccaaaaggca

SEQ ID NO: 1072258 - DNA, 33 bp, Homo sapien
acacgaaatattgctggcaaccaccaaaaggca

SEQ ID NO: 1072259 - DNA, 33 bp, Homo sapien
ccattctttcccactccagtattcatcagtgtc

SEQ ID NO: 1072260 - DNA, 33 bp, Homo sapien
ccattctttcccactctagtattcatcagtgtc

SEQ ID NO: 1072261 - DNA, 33 bp, Homo sapien
cctaatcgctttctaacgtaaacagcacaaaca

SEQ ID NO: 1072262 - DNA, 33 bp, Homo sapien
cctaatcgctttctaatgtaaacagcacaaaca

SEQ ID NO: 1072263 - DNA, 33 bp, Homo sapien
tattctgtattcttgacaatggattatgctctg

SEQ ID NO: 1072264 - DNA, 33 bp, Homo sapien
tattctgtattcttgataatggattatgctctg

SEQ ID NO: 1072265 - DNA, 33 bp, Homo sapien
tatgcttctaatttgcactttgctgaagtagtg

SEQ ID NO: 1072266 - DNA, 33 bp, Homo sapien
tatgcttctaatttgcgctttgctgaagtagtg

SEQ ID NO: 1072267 - DNA, 33 bp, Homo sapien
ggtggaaatataaaagccagaagttaggatgaa

SEQ ID NO: 1072268 - DNA, 33 bp, Homo sapien
ggtggaaatataaaagtcagaagttaggatgaa

SEQ ID NO: 1072269 - DNA, 33 bp, Homo sapien
aattgtcagaattaaccgagctaatttatgtaa

SEQ ID NO: 1072270 - DNA, 33 bp, Homo sapien
aattgtcagaattaactgagctaatttatgtaa

SEQ ID NO: 1072271 - DNA, 33 bp, Homo sapien
tcctgttagcgctatacaggaccctaccaatgc

SEQ ID NO: 1072272 - DNA, 33 bp, Homo sapien
tcctgttagcgctatataggaccctaccaatgc

SEQ ID NO: 1072273 - DNA, 33 bp, Homo sapien
tttcaccactattaaccgctctctaggccccaa

SEQ ID NO: 1072274 - DNA, 33 bp, Homo sapien
tttcaccactattaactgctctctaggccccaa

SEQ ID NO: 1072275 - DNA, 33 bp, Homo sapien
tgtatatacagtatgaactcaaattgctaagac

SEQ ID NO: 1072276 - DNA, 33 bp, Homo sapien
tgtatatacagtatgatctcaaattgctaagac

SEQ ID NO: 1072277 - DNA, 33 bp, Homo sapien
gactatacagaccactatctacacggaagctgg

SEQ ID NO: 1072278 - DNA, 33 bp, Homo sapien
gactatacagaccactctctacacggaagctgg

SEQ ID NO: 1072279 - DNA, 33 bp, Homo sapien
cagagacaaagttaccagaagtgctttactagc

SEQ ID NO: 1072280 - DNA, 33 bp, Homo sapien
cagagacaaagttaccggaagtgctttactagc

SEQ ID NO: 1072281 - DNA, 33 bp, Homo sapien
ttcaagaatgttcttacgttagcacaagattta

SEQ ID NO: 1072282 - DNA, 33 bp, Homo sapien
ttcaagaatgttcttatgttagcacaagattta

SEQ ID NO: 1072283 - DNA, 33 bp, Homo sapien
ccagatggtcaccctactaaaatgatattgctg

SEQ ID NO: 1072284 - DNA, 33 bp, Homo sapien
ccagatggtcaccctagtaaaatgatattgctg

SEQ ID NO: 1072285 - DNA, 33 bp, Homo sapien
aagatgttcgtagctgcaacaaaggaaacctaa

SEQ ID NO: 1072286 - DNA, 33 bp, Homo sapien
aagatgttcgtagctgtaacaaaggaaacctaa

SEQ ID NO: 1072287 - DNA, 33 bp, Homo sapien
gaggaaaccattctccacttcagaagataatct

SEQ ID NO: 1072288 - DNA, 33 bp, Homo sapien
gaggaaaccattctccgcttcagaagataatct

SEQ ID NO: 1072289 - DNA, 33 bp, Homo sapien
catgaaatggtaatcacgacaattgttaagtag

SEQ ID NO: 1072290 - DNA, 33 bp, Homo sapien
catgaaatggtaatcaggacaattgttaagtag

SEQ ID NO: 1072291 - DNA, 33 bp, Homo sapien
aatggggtattggcgccgaaaaggtattttctt

SEQ ID NO: 1072292 - DNA, 33 bp, Homo sapien
aatggggtattggcgctgaaaaggtattttctt

SEQ ID NO: 1072293 - DNA, 33 bp, Homo sapien
agatcttgttaaatagacagattcatgggctac

SEQ ID NO: 1072294 - DNA, 33 bp, Homo sapien
agatcttgttaaataggcagattcatgggctac

SEQ ID NO: 1072295 - DNA, 33 bp, Homo sapien
ttggatttactacctacgggagcacttctgaaa

SEQ ID NO: 1072296 - DNA, 33 bp, Homo sapien
ttggatttactacctatgggagcacttctgaaa

SEQ ID NO: 1072297 - DNA, 33 bp, Homo sapien
ctctgattagatcttcacagtgacaggtttatt

SEQ ID NO: 1072298 - DNA, 33 bp, Homo sapien
ctctgattagatcttcgcagtgacaggtttatt

SEQ ID NO: 1072299 - DNA, 33 bp, Homo sapien
aaaatgttttttcctcaacagcagatattatga

SEQ ID NO: 1072300 - DNA, 33 bp, Homo sapien
aaaatgttttttcctcgacagcagatattatga

SEQ ID NO: 1072301 - DNA, 33 bp, Homo sapien
gatagagcctgacttcaaggtgtatttcaaact

SEQ ID NO: 1072302 - DNA, 33 bp, Homo sapien
gatagagcctgacttcgaggtgtatttcaaact

SEQ ID NO: 1072303 - DNA, 33 bp, Homo sapien
cagctcctcaatttgacaaattatagcaaatcc

SEQ ID NO: 1072304 - DNA, 33 bp, Homo sapien
cagctcctcaatttgataaattatagcaaatcc

SEQ ID NO: 1072305 - DNA, 33 bp, Homo sapien
tgacctgtgtgtagtgaatatttgacctttttt

SEQ ID NO: 1072306 - DNA, 33 bp, Homo sapien
tgacctgtgtgtagtgcatatttgacctttttt

SEQ ID NO: 1072307 - DNA, 33 bp, Homo sapien
ttaatatgtacccaaaacttctattagaacatg

SEQ ID NO: 1072308 - DNA, 33 bp, Homo sapien
ttaatatgtacccaaagcttctattagaacatg

SEQ ID NO: 1072309 - DNA, 33 bp, Homo sapien
tagagaatttccttctcactcaaaaatgaaggg

SEQ ID NO: 1072310 - DNA, 33 bp, Homo sapien
tagagaatttccttctgactcaaaaatgaaggg

SEQ ID NO: 1072311 - DNA, 33 bp, Homo sapien
ctagatgatctagaggacattatcactggaatg

SEQ ID NO: 1072312 - DNA, 33 bp, Homo sapien
ctagatgatctagagggcattatcactggaatg

SEQ ID NO: 1072313 - DNA, 33 bp, Homo sapien
gtctgcatttattaacggcttagaatgtccatc

SEQ ID NO: 1072314 - DNA, 33 bp, Homo sapien
gtctgcatttattaactgcttagaatgtccatc

SEQ ID NO: 1072315 - DNA, 33 bp, Homo sapien
aaggttaacaaatgtaagcatgactatattacc

SEQ ID NO: 1072316 - DNA, 33 bp, Homo sapien
aaggttaacaaatgtaggcatgactatattacc

SEQ ID NO: 1072317 - DNA, 33 bp, Homo sapien
tattctcattagtttcaaataacttcttaattt

SEQ ID NO: 1072318 - DNA, 33 bp, Homo sapien
tattctcattagtttcgaataacttcttaattt

SEQ ID NO: 1072319 - DNA, 33 bp, Homo sapien
attcaacttcaatataactgtgtggttttgagt

SEQ ID NO: 1072320 - DNA, 33 bp, Homo sapien
attcaacttcaatatagctgtgtggttttgagt

SEQ ID NO: 1072321 - DNA, 33 bp, Homo sapien
ttggtgaggagtttaacgctcccactattattg

SEQ ID NO: 1072322 - DNA, 33 bp, Homo sapien
ttggtgaggagtttaatgctcccactattattg

SEQ ID NO: 1072323 - DNA, 33 bp, Homo sapien
gtttcaaaatcactgaaccaaagtaagaccaaa

SEQ ID NO: 1072324 - DNA, 33 bp, Homo sapien
gtttcaaaatcactgacccaaagtaagaccaaa

SEQ ID NO: 1072325 - DNA, 33 bp, Homo sapien
cacctccagataaagacgaagtgacatcaggaa

SEQ ID NO: 1072326 - DNA, 33 bp, Homo sapien
cacctccagataaagatgaagtgacatcaggaa

SEQ ID NO: 1072327 - DNA, 33 bp, Homo sapien
cccccaaatgtattcacgcctagagagtagatg

SEQ ID NO: 1072328 - DNA, 33 bp, Homo sapien
cccccaaatgtattcatgcctagagagtagatg

SEQ ID NO: 1072329 - DNA, 33 bp, Homo sapien
tttaggaaaaacaagacggttaattcagtcagc

SEQ ID NO: 1072330 - DNA, 33 bp, Homo sapien
tttaggaaaaacaagatggttaattcagtcagc

SEQ ID NO: 1072331 - DNA, 33 bp, Homo sapien
aggtaaattgctgcaacgcaggccctaaaacta

SEQ ID NO: 1072332 - DNA, 33 bp, Homo sapien
aggtaaattgctgcaatgcaggccctaaaacta

SEQ ID NO: 1072333 - DNA, 33 bp, Homo sapien
ccttcagataagtctacgccttcgtcctcctcc

SEQ ID NO: 1072334 - DNA, 33 bp, Homo sapien
ccttcagataagtctatgccttcgtcctcctcc

SEQ ID NO: 1072335 - DNA, 33 bp, Homo sapien
tcagaaggaagaaccacgatagttcaaggcagg

SEQ ID NO: 1072336 - DNA, 33 bp, Homo sapien
tcagaaggaagaaccatgatagttcaaggcagg

SEQ ID NO: 1072337 - DNA, 33 bp, Homo sapien
aagttactattggctgaagtcactctgttgtgc

SEQ ID NO: 1072338 - DNA, 33 bp, Homo sapien
aagttactattggctgcagtcactctgttgtgc

SEQ ID NO: 1072339 - DNA, 33 bp, Homo sapien
ggggaagtcaggatgacgcattgaagtccacag

SEQ ID NO: 1072340 - DNA, 33 bp, Homo sapien
ggggaagtcaggatgatgcattgaagtccacag

SEQ ID NO: 1072341 - DNA, 33 bp, Homo sapien
ttcattctcagagtgacggtctgaaattgaaac

SEQ ID NO: 1072342 - DNA, 33 bp, Homo sapien
ttcattctcagagtgatggtctgaaattgaaac

SEQ ID NO: 1072343 - DNA, 33 bp, Homo sapien
tagatttcaaaagatgcacggaaatgcctggac

SEQ ID NO: 1072344 - DNA, 33 bp, Homo sapien
tagatttcaaaagatgtacggaaatgcctggac

SEQ ID NO: 1072345 - DNA, 33 bp, Homo sapien
gagggtccagggagaaaatgaaatggtttgatt

SEQ ID NO: 1072346 - DNA, 33 bp, Homo sapien
gagggtccagggagaagatgaaatggtttgatt

SEQ ID NO: 1072347 - DNA, 33 bp, Homo sapien
tggacaagctttgtctaaacctatctttgttgc

SEQ ID NO: 1072348 - DNA, 33 bp, Homo sapien
tggacaagctttgtctcaacctatctttgttgc

SEQ ID NO: 1072349 - DNA, 33 bp, Homo sapien
agatagagaacactggcatagcctcatccatac

SEQ ID NO: 1072350 - DNA, 33 bp, Homo sapien
agatagagaacactggtatagcctcatccatac

SEQ ID NO: 1072351 - DNA, 33 bp, Homo sapien
cctgtccagacataccggagtaagccaaagcca

SEQ ID NO: 1072352 - DNA, 33 bp, Homo sapien
cctgtccagacatacctgagtaagccaaagcca

SEQ ID NO: 1072353 - DNA, 33 bp, Homo sapien
tggtgtggtcctggcaaagaaaacgattattcc

SEQ ID NO: 1072354 - DNA, 33 bp, Homo sapien
tggtgtggtcctggcagagaaaacgattattcc

SEQ ID NO: 1072355 - DNA, 33 bp, Homo sapien
tattccatccatatcactaactagagctccagc

SEQ ID NO: 1072356 - DNA, 33 bp, Homo sapien
tattccatccatatcattaactagagctccagc

SEQ ID NO: 1072357 - DNA, 33 bp, Homo sapien
gttttccttcttggcacggattattacaacaca

SEQ ID NO: 1072358 - DNA, 33 bp, Homo sapien
gttttccttcttggcatggattattacaacaca

SEQ ID NO: 1072359 - DNA, 33 bp, Homo sapien
ggtgttaacttttgaacgtgtaagatttgccac

SEQ ID NO: 1072360 - DNA, 33 bp, Homo sapien
ggtgttaacttttgaaggtgtaagatttgccac

SEQ ID NO: 1072361 - DNA, 33 bp, Homo sapien
atagtgagcataaaaagggttatctacttggat

SEQ ID NO: 1072362 - DNA, 33 bp, Homo sapien
atagtgagcataaaaatggttatctacttggat

SEQ ID NO: 1072363 - DNA, 33 bp, Homo sapien
acaagagttattcattaaaactgtgtctatgaa

SEQ ID NO: 1072364 - DNA, 33 bp, Homo sapien
acaagagttattcatttaaactgtgtctatgaa

SEQ ID NO: 1072365 - DNA, 33 bp, Homo sapien
tcactgcagttgacataaacataaggtctaaaa

SEQ ID NO: 1072366 - DNA, 33 bp, Homo sapien
tcactgcagttgacatcaacataaggtctaaaa

SEQ ID NO: 1072367 - DNA, 33 bp, Homo sapien
agtaagcataaaccacaagcttgtacttcaaaa

SEQ ID NO: 1072368 - DNA, 33 bp, Homo sapien
agtaagcataaaccacgagcttgtacttcaaaa

SEQ ID NO: 1072369 - DNA, 33 bp, Homo sapien
cagcatgagtggatacaatcaagttttgcagga

SEQ ID NO: 1072370 - DNA, 33 bp, Homo sapien
cagcatgagtggatacgatcaagttttgcagga

SEQ ID NO: 1072371 - DNA, 33 bp, Homo sapien
tcagatagatttggaagaaacttcaattatagt

SEQ ID NO: 1072372 - DNA, 33 bp, Homo sapien
tcagatagatttggaataaacttcaattatagt

SEQ ID NO: 1072373 - DNA, 33 bp, Homo sapien
caaagccatcattggccatgtcagaactatctg

SEQ ID NO: 1072374 - DNA, 33 bp, Homo sapien
caaagccatcattggctatgtcagaactatctg

SEQ ID NO: 1072375 - DNA, 33 bp, Homo sapien
cctaattcacactttaacacattttactgttaa

SEQ ID NO: 1072376 - DNA, 33 bp, Homo sapien
cctaattcacactttagcacattttactgttaa

SEQ ID NO: 1072377 - DNA, 33 bp, Homo sapien
tcagacttttcctctgcacctttctcacctatc

SEQ ID NO: 1072378 - DNA, 33 bp, Homo sapien
tcagacttttcctctgtacctttctcacctatc

SEQ ID NO: 1072379 - DNA, 33 bp, Homo sapien
taaaattgccgatatacgttaaattgaaatgcc

SEQ ID NO: 1072380 - DNA, 33 bp, Homo sapien
taaaattgccgatatatgttaaattgaaatgcc

SEQ ID NO: 1072381 - DNA, 33 bp, Homo sapien
aagagaacttatcacaaaagaatactagtgact

SEQ ID NO: 1072382 - DNA, 33 bp, Homo sapien
aagagaacttatcacagaagaatactagtgact

SEQ ID NO: 1072383 - DNA, 33 bp, Homo sapien
ttgcctaatactttgaacaggactatttttcta

SEQ ID NO: 1072384 - DNA, 33 bp, Homo sapien
ttgcctaatactttgagcaggactatttttcta

SEQ ID NO: 1072385 - DNA, 33 bp, Homo sapien
tgtcattggaaatctaagaccactcaacaaaat

SEQ ID NO: 1072386 - DNA, 33 bp, Homo sapien
tgtcattggaaatctaggaccactcaacaaaat

SEQ ID NO: 1072387 - DNA, 33 bp, Homo sapien
tatatacatcagtgcccaaaattcagagggggc

SEQ ID NO: 1072388 - DNA, 33 bp, Homo sapien
tatatacatcagtgccgaaaattcagagggggc

SEQ ID NO: 1072389 - DNA, 33 bp, Homo sapien
ggtagcccctctgaagacctgataggaaatgtt

SEQ ID NO: 1072390 - DNA, 33 bp, Homo sapien
ggtagcccctctgaaggcctgataggaaatgtt

SEQ ID NO: 1072391 - DNA, 33 bp, Homo sapien; identical to SEQ ID NO: 1072389

SEQ ID NO: 1072392 - DNA, 33 bp, Homo sapien; identical to SEQ ID NO: 1072390

SEQ ID NO: 1072393 - DNA, 33 bp, Homo sapien
aaagtagtaaaccatcaaattattgaacaatac

SEQ ID NO: 1072394 - DNA, 33 bp, Homo sapien
aaagtagtaaaccatctaattattgaacaatac

SEQ ID NO: 1072395 - DNA, 33 bp, Homo sapien
ttttttgcaggctatcagactaagggccaaaat

SEQ ID NO: 1072396 - DNA, 33 bp, Homo sapien
ttttttgcaggctatcggactaagggccaaaat

SEQ ID NO: 1072397 - DNA, 33 bp, Homo sapien
tgtgcggtgagcatgcaaccatgtttaatctta

SEQ ID NO: 1072398 - DNA, 33 bp, Homo sapien
tgtgcggtgagcatgcgaccatgtttaatctta

SEQ ID NO: 1072399 - DNA, 33 bp, Homo sapien
gctctacaactgactaagtaaaaatagtatgtt

SEQ ID NO: 1072400 - DNA, 33 bp, Homo sapien
gctctacaactgactaggtaaaaatagtatgtt

SEQ ID NO: 1072401 - DNA, 33 bp, Homo sapien
gcgaatgcactaagaaagttcattgaggcacaa

SEQ ID NO: 1072402 - DNA, 33 bp, Homo sapien
gcgaatgcactaagaaggttcattgaggcacaa

SEQ ID NO: 1072403 - DNA, 33 bp, Homo sapien
aatacaagcagaagtactaacagcaaaatatag

SEQ ID NO: 1072404 - DNA, 33 bp, Homo sapien
aatacaagcagaagtattaacagcaaaatatag

SEQ ID NO: 1072405 - DNA, 33 bp, Homo sapien
ctggcaagtaaagggactatatgattgttcacc

SEQ ID NO: 1072406 - DNA, 33 bp, Homo sapien
ctggcaagtaaagggagtatatgattgttcacc

SEQ ID NO: 1072407 - DNA, 33 bp, Homo sapien
ctcctatgttctccaacaagctttattgttttc

SEQ ID NO: 1072408 - DNA, 33 bp, Homo sapien
ctcctatgttctccaagaagctttattgttttc

SEQ ID NO: 1072409 - DNA, 33 bp, Homo sapien
gtttttgtatgtagcaataacccattattttta

SEQ ID NO: 1072410 - DNA, 33 bp, Homo sapien
gtttttgtatgtagcagtaacccattattttta

SEQ ID NO: 1072411 - DNA, 33 bp, Homo sapien
aatatatggtgataatcacaatagtggtggcct

SEQ ID NO: 1072412 - DNA, 33 bp, Homo sapien
aatatatggtgataattacaatagtggtggcct

SEQ ID NO: 1072413 - DNA, 33 bp, Homo sapien
acatgaagagctaccacgggtgtttgcgttcca

SEQ ID NO: 1072414 - DNA, 33 bp, Homo sapien
acatgaagagctaccatgggtgtttgcgttcca

SEQ ID NO: 1072415 - DNA, 33 bp, Homo sapien
aagtcagtggggctaaacctacagtttggaagt

SEQ ID NO: 1072416 - DNA, 33 bp, Homo sapien
aagtcagtggggctaagcctacagtttggaagt

SEQ ID NO: 1072417 - DNA, 33 bp, Homo sapien
atggaaggctgtaatacgggttgagcataaatg

SEQ ID NO: 1072418 - DNA, 33 bp, Homo sapien
atggaaggctgtaatatgggttgagcataaatg

SEQ ID NO: 1072419 - DNA, 33 bp, Homo sapien
aatcttttctcaccaaaataggatagtctctgg

SEQ ID NO: 1072420 - DNA, 33 bp, Homo sapien
aatcttttctcaccaagataggatagtctctgg

SEQ ID NO: 1072421 - DNA, 33 bp, Homo sapien
ttatatggaattaacaaaccatacatttgaatt

SEQ ID NO: 1072422 - DNA, 33 bp, Homo sapien
ttatatggaattaacagaccatacatttgaatt

SEQ ID NO: 1072423 - DNA, 33 bp, Homo sapien
tatataacctttagccaaacacataaccttacc

SEQ ID NO: 1072424 - DNA, 33 bp, Homo sapien
tatataacctttagccgaacacataaccttacc

SEQ ID NO: 1072425 - DNA, 33 bp, Homo sapien
agtgagagcaatgctcactttcttagagagtta

SEQ ID NO: 1072426 - DNA, 33 bp, Homo sapien
agtgagagcaatgctcgctttcttagagagtta

SEQ ID NO: 1072427 - DNA, 33 bp, Homo sapien
tatgtccttgctacctaagagatcctgctacat

SEQ ID NO: 1072428 - DNA, 33 bp, Homo sapien
tatgtccttgctacctgagagatcctgctacat

SEQ ID NO: 1072429 - DNA, 33 bp, Homo sapien
ctacactactaaagtgaatggacactcacaatg

SEQ ID NO: 1072430 - DNA, 33 bp, Homo sapien
ctacactactaaagtggatggacactcacaatg

SEQ ID NO: 1072431 - DNA, 33 bp, Homo sapien
atagttcacgtgacacaatggaactattctgtg

SEQ ID NO: 1072432 - DNA, 33 bp, Homo sapien
atagttcacgtgacacgatggaactattctgtg

SEQ ID NO: 1072433 - DNA, 33 bp, Homo sapien
tgactgagacactgcaaatatgcaagagaaaac

SEQ ID NO: 1072434 - DNA, 33 bp, Homo sapien
tgactgagacactgcagatatgcaagagaaaac

SEQ ID NO: 1072435 - DNA, 33 bp, Homo sapien
gacttgttacaagcaacgtaccttattctatta

SEQ ID NO: 1072436 - DNA, 33 bp, Homo sapien
gacttgttacaagcaatgtaccttattctatta

SEQ ID NO: 1072437 - DNA, 33 bp, Homo sapien
acccaatatgataaaactactagaagaccacat

SEQ ID NO: 1072438 - DNA, 33 bp, Homo sapien
acccaatatgataaaattactagaagaccacat

SEQ ID NO: 1072439 - DNA, 33 bp, Homo sapien
atccagaggaatttaaatcaatatgtacaaaag

SEQ ID NO: 1072440 - DNA, 33 bp, Homo sapien
atccagaggaatttaagtcaatatgtacaaaag

SEQ ID NO: 1072441 - DNA, 33 bp, Homo sapien
ataactgcttctagcaccattaatgtccctgca

SEQ ID NO: 1072442 - DNA, 33 bp, Homo sapien
ataactgcttctagcatcattaatgtccctgca

SEQ ID NO: 1072443 - DNA, 33 bp, Homo sapien
caattgctcaactacacgctttttataagaaat

SEQ ID NO: 1072444 - DNA, 33 bp, Homo sapien
caattgctcaactacaggctttttataagaaat

SEQ ID NO: 1072445 - DNA, 33 bp, Homo sapien
aaaccaggtaccgtaacgtctcatctggttttc

SEQ ID NO: 1072446 - DNA, 33 bp, Homo sapien
aaaccaggtaccgtaatgtctcatctggttttc

SEQ ID NO: 1072447 - DNA, 33 bp, Homo sapien
gtgatccgtatcaacacaaaggataacaaaagt

SEQ ID NO: 1072448 - DNA, 33 bp, Homo sapien
gtgatccgtatcaacagaaaggataacaaaagt

SEQ ID NO: 1072449 - DNA, 33 bp, Homo sapien
tcctagtgtcaccttacgaattatcactaaatg

SEQ ID NO: 1072450 - DNA, 33 bp, Homo sapien
tcctagtgtcaccttatgaattatcactaaatg

SEQ ID NO: 1072451 - DNA, 33 bp, Homo sapien
ctgtgattatttcaacccttagtataaccctag

SEQ ID NO: 1072452 - DNA, 33 bp, Homo sapien
ctgtgattatttcaactcttagtataaccctag

SEQ ID NO: 1072453 - DNA, 33 bp, Homo sapien
gtgggtgctcactagacaagtgaagaatttgca

SEQ ID NO: 1072454 - DNA, 33 bp, Homo sapien
gtgggtgctcactagataagtgaagaatttgca

SEQ ID NO: 1072455 - DNA, 33 bp, Homo sapien
taacacacacattctaggtaaatgtattccata

SEQ ID NO: 1072456 - DNA, 33 bp, Homo sapien
taacacacacattctatgtaaatgtattccata

SEQ ID NO: 1072457 - DNA, 33 bp, Homo sapien
aatgacaatgtcagagccgaatagttttgagag

SEQ ID NO: 1072458 - DNA, 33 bp, Homo sapien
aatgacaatgtcagagtcgaatagttttgagag

SEQ ID NO: 1072459 - DNA, 33 bp, Homo sapien
acacccatttaggccagatcctcattttacaaa

SEQ ID NO: 1072460 - DNA, 33 bp, Homo sapien
acacccatttaggccatatcctcattttacaaa

SEQ ID NO: 1072461 - DNA, 33 bp, Homo sapien
ctactcaaacttttctcaaaaacagaggcggag

SEQ ID NO: 1072462 - DNA, 33 bp, Homo sapien
ctactcaaacttttctgaaaaacagaggcggag

SEQ ID NO: 1072463 - DNA, 33 bp, Homo sapien
aagacaaagactgtcaatccaaatattctaaag

SEQ ID NO: 1072464 - DNA, 33 bp, Homo sapien
aagacaaagactgtcagtccaaatattctaaag

SEQ ID NO: 1072465 - DNA, 33 bp, Homo sapien
tgtatttgtttactccactgtagtattcaatct

SEQ ID NO: 1072466 - DNA, 33 bp, Homo sapien
tgtatttgtttactccgctgtagtattcaatct

SEQ ID NO: 1072467 - DNA, 33 bp, Homo sapien
ctgtcttacattcaagcaaaaaaggaataaaag

SEQ ID NO: 1072468 - DNA, 33 bp, Homo sapien
ctgtcttacattcaagtaaaaaaggaataaaag

SEQ ID NO: 1072469 - DNA, 33 bp, Homo sapien
tttgacctgactctaccggctttttctgactct

SEQ ID NO: 1072470 - DNA, 33 bp, Homo sapien
tttgacctgactctactggctttttctgactct

SEQ ID NO: 1072471 - DNA, 33 bp, Homo sapien
agaaaaatcatgaaacagtagagagaatattgg

SEQ ID NO: 1072472 - DNA, 33 bp, Homo sapien
agaaaaatcatgaaacggtagagagaatattgg

SEQ ID NO: 1072473 - DNA, 33 bp, Homo sapien
tgtaaactttaattgaatcaacactatacagac

SEQ ID NO: 1072474 - DNA, 33 bp, Homo sapien
tgtaaactttaattgactcaacactatacagac

SEQ ID NO: 1072475 - DNA, 33 bp, Homo sapien
ccgttttcctgtcaaacactaggtctttattca

SEQ ID NO: 1072476 - DNA, 33 bp, Homo sapien
ccgttttcctgtcaaatactaggtctttattca

SEQ ID NO: 1072477 - DNA, 33 bp, Homo sapien
agaaagggtgaattcaatctctatgcttcagct

SEQ ID NO: 1072478 - DNA, 33 bp, Homo sapien
agaaagggtgaattcactctctatgcttcagct

SEQ ID NO: 1072479 - DNA, 33 bp, Homo sapien
aatagtcactgtttaacctttcttgtccagttt

SEQ ID NO: 1072480 - DNA, 33 bp, Homo sapien
aatagtcactgtttaagctttcttgtccagttt

SEQ ID NO: 1072481 - DNA, 33 bp, Homo sapien
atatttctaagggaaaagagttctgaaatataa

SEQ ID NO: 1072482 - DNA, 33 bp, Homo sapien
atatttctaagggaaaggagttctgaaatataa

SEQ ID NO: 1072483 - DNA, 33 bp, Homo sapien
cttgactctagaatcaaccgcttgtgtgtttgt

SEQ ID NO: 1072484 - DNA, 33 bp, Homo sapien
cttgactctagaatcacccgcttgtgtgtttgt

SEQ ID NO: 1072485 - DNA, 33 bp, Homo sapien
ttcctgaatggccaccaggtaaacaaagaaatt

SEQ ID NO: 1072486 - DNA, 33 bp, Homo sapien
ttcctgaatggccaccgggtaaacaaagaaatt

SEQ ID NO: 1072487 - DNA, 33 bp, Homo sapien
tttaagatcccagaacaattaaaataaaactaa

SEQ ID NO: 1072488 - DNA, 33 bp, Homo sapien
tttaagatcccagaacgattaaaataaaactaa

SEQ ID NO: 1072489 - DNA, 33 bp, Homo sapien
ccaataggctcaacaaatacattagatccatgc

SEQ ID NO: 1072490 - DNA, 33 bp, Homo sapien
ccaataggctcaacaagtacattagatccatgc

SEQ ID NO: 1072491 - DNA, 33 bp, Homo sapien
acaaccttaacttgtaagagaaatacatatgct

SEQ ID NO: 1072492 - DNA, 33 bp, Homo sapien
acaaccttaacttgtaggagaaatacatatgct

SEQ ID NO: 1072493 - DNA, 33 bp, Homo sapien
tgtgtgcatatcattaaaacaaagtaaggtatt

SEQ ID NO: 1072494 - DNA, 33 bp, Homo sapien
tgtgtgcatatcattacaacaaagtaaggtatt

SEQ ID NO: 1072495 - DNA, 33 bp, Homo sapien
agtcaccttttatatgccaaggaagcattttga

SEQ ID NO: 1072496 - DNA, 33 bp, Homo sapien
agtcaccttttatatggcaaggaagcattttga

SEQ ID NO: 1072497 - DNA, 33 bp, Homo sapien
gtagaaaccaaataaactaggctagtaccttga

SEQ ID NO: 1072498 - DNA, 33 bp, Homo sapien
gtagaaaccaaataaattaggctagtaccttga

SEQ ID NO: 1072499 - DNA, 33 bp, Homo sapien
gatattctggctcaagaaacaaggactgatgcc

SEQ ID NO: 1072500 - DNA, 33 bp, Homo sapien
gatattctggctcaaggaacaaggactgatgcc

SEQ ID NO: 1072501 - DNA, 33 bp, Homo sapien
ggtcttattatggttcacctactttactaacct

SEQ ID NO: 1072502 - DNA, 33 bp, Homo sapien
ggtcttattatggttcgcctactttactaacct

SEQ ID NO: 1072503 - DNA, 33 bp, Homo sapien
gatagactagataaacaaaatatggaggttgcc

SEQ ID NO: 1072504 - DNA, 33 bp, Homo sapien
gatagactagataaaccaaatatggaggttgcc

SEQ ID NO: 1072505 - DNA, 33 bp, Homo sapien
gtcaagaggacgtcgaagggagcatgctgacgg

SEQ ID NO: 1072506 - DNA, 33 bp, Homo sapien
gtcaagaggacgtcgaggggagcatgctgacgg

SEQ ID NO: 1072507 - DNA, 33 bp, Homo sapien
tgctctctgtgcttcaatcagaaggaagggacc

SEQ ID NO: 1072508 - DNA, 33 bp, Homo sapien
tgctctctgtgcttcagtcagaaggaagggacc

SEQ ID NO: 1072509 - DNA, 33 bp, Homo sapien
ttttctaagagattctaaaggcaactgaaggtt

SEQ ID NO: 1072510 - DNA, 33 bp, Homo sapien
ttttctaagagattctgaaggcaactgaaggtt

SEQ ID NO: 1072511 - DNA, 33 bp, Homo sapien
cattatatttcctcaactgtactcagatctctt

SEQ ID NO: 1072512 - DNA, 33 bp, Homo sapien
cattatatttcctcaattgtactcagatctctt

SEQ ID NO: 1072513 - DNA, 33 bp, Homo sapien
tttaagagagaaaactcaaagtctttgcatagg

SEQ ID NO: 1072514 - DNA, 33 bp, Homo sapien
tttaagagagaaaactgaaagtctttgcatagg

SEQ ID NO: 1072515 - DNA, 33 bp, Homo sapien
acagccaacctagttaaaattattagcaatcgc

SEQ ID NO: 1072516 - DNA, 33 bp, Homo sapien
acagccaacctagttagaattattagcaatcgc

SEQ ID NO: 1072517 - DNA, 33 bp, Homo sapien
acagagatgctttaaacgtgtgttataaccaga

SEQ ID NO: 1072518 - DNA, 33 bp, Homo sapien
acagagatgctttaaatgtgtgttataaccaga

SEQ ID NO: 1072519 - DNA, 33 bp, Homo sapien
aatattaaagcttctcacttcctcaaggataga

SEQ ID NO: 1072520 - DNA, 33 bp, Homo sapien
aatattaaagcttctcccttcctcaaggataga

SEQ ID NO: 1072521 - DNA, 33 bp, Homo sapien
acactcaaaaacacgccgaaaaatctagatgga

SEQ ID NO: 1072522 - DNA, 33 bp, Homo sapien
acactcaaaaacacgctgaaaaatctagatgga

SEQ ID NO: 1072523 - DNA, 33 bp, Homo sapien
tatagatagctttaacagtgcaaaaatattcaa

SEQ ID NO: 1072524 - DNA, 33 bp, Homo sapien
tatagatagctttaacggtgcaaaaatattcaa

SEQ ID NO: 1072525 - DNA, 33 bp, Homo sapien
atatagttgggcggaaagcatgaaatttgttct

SEQ ID NO: 1072526 - DNA, 33 bp, Homo sapien
atatagttgggcggaaggcatgaaatttgttct

SEQ ID NO: 1072527 - DNA, 33 bp, Homo sapien
tgaccaagcgagcttaccccaagaatttaaagt

SEQ ID NO: 1072528 - DNA, 33 bp, Homo sapien
tgaccaagcgagcttatcccaagaatttaaagt

SEQ ID NO: 1072529 - DNA, 33 bp, Homo sapien
agtaatttcaatagaaacttgcttagtaggcat

SEQ ID NO: 1072530 - DNA, 33 bp, Homo sapien
agtaatttcaatagaatcttgcttagtaggcat

SEQ ID NO: 1072531 - DNA, 33 bp, Homo sapien
aggacatctgttaaggaaaatttgtgctctcta

SEQ ID NO: 1072532 - DNA, 33 bp, Homo sapien
aggacatctgttaaggcaaatttgtgctctcta

SEQ ID NO: 1072533 - DNA, 33 bp, Homo sapien
ggccttcctgtctagaactcatagccccagtct

SEQ ID NO: 1072534 - DNA, 33 bp, Homo sapien
ggccttcctgtctagatctcatagccccagtct

SEQ ID NO: 1072535 - DNA, 33 bp, Homo sapien
ctctggttctcagtgacagtagggcagggaatg

SEQ ID NO: 1072536 - DNA, 33 bp, Homo sapien
ctctggttctcagtgatagtagggcagggaatg

SEQ ID NO: 1072537 - DNA, 33 bp, Homo sapien
tattaaaaaaatgatcaaggaagtataatgagg

SEQ ID NO: 1072538 - DNA, 33 bp, Homo sapien
tattaaaaaaatgatccaggaagtataatgagg

SEQ ID NO: 1072539 - DNA, 33 bp, Homo sapien
tgttttggaacattaccggatccttgacctgct

SEQ ID NO: 1072540 - DNA, 33 bp, Homo sapien
tgttttggaacattactggatccttgacctgct

SEQ ID NO: 1072541 - DNA, 33 bp, Homo sapien
ctcacaatgtatccagcatgttcttaggagctc

SEQ ID NO: 1072542 - DNA, 33 bp, Homo sapien
ctcacaatgtatccagtatgttcttaggagctc

SEQ ID NO: 1072543 - DNA, 33 bp, Homo sapien
gtaagatgtagtgtcacgggaagcagataggta

SEQ ID NO: 1072544 - DNA, 33 bp, Homo sapien
gtaagatgtagtgtcatgggaagcagataggta

SEQ ID NO: 1072545 - DNA, 33 bp, Homo sapien
agcatacattactcaacaattaaaagctacaaa

SEQ ID NO: 1072546 - DNA, 33 bp, Homo sapien
agcatacattactcaataattaaaagctacaaa

SEQ ID NO: 1072547 - DNA, 33 bp, Homo sapien
ctggccaaaagtatgacgctaccactgtgcaaa

SEQ ID NO: 1072548 - DNA, 33 bp, Homo sapien
ctggccaaaagtatgatgctaccactgtgcaaa

SEQ ID NO: 1072549 - DNA, 33 bp, Homo sapien
gtgcaaatagtgatgacatttcctggtgtactt

SEQ ID NO: 1072550 - DNA, 33 bp, Homo sapien
gtgcaaatagtgatgatatttcctggtgtactt

SEQ ID NO: 1072551 - DNA, 33 bp, Homo sapien
gctgtggctcatgaagaaataccacacaccctg

SEQ ID NO: 1072552 - DNA, 33 bp, Homo sapien
gctgtggctcatgaaggaataccacacaccctg

SEQ ID NO: 1072553 - DNA, 33 bp, Homo sapien
ctctgagtttggctcaaatggaagcagttatat

SEQ ID NO: 1072554 - DNA, 33 bp, Homo sapien
ctctgagtttggctcacatggaagcagttatat

SEQ ID NO: 1072555 - DNA, 33 bp, Homo sapien
ttagagaaagcccaccaaaactgaggaaatgga

SEQ ID NO: 1072556 - DNA, 33 bp, Homo sapien
ttagagaaagcccaccgaaactgaggaaatgga

SEQ ID NO: 1072557 - DNA, 33 bp, Homo sapien
aaagtttacccttgaccggttgatatatgttaa

SEQ ID NO: 1072558 - DNA, 33 bp, Homo sapien
aaagtttacccttgactggttgatatatgttaa

SEQ ID NO: 1072559 - DNA, 33 bp, Homo sapien
tctaattgtaacattaagttgctacacttacaa

SEQ ID NO: 1072560 - DNA, 33 bp, Homo sapien
tctaattgtaacattatgttgctacacttacaa

SEQ ID NO: 1072561 - DNA, 33 bp, Homo sapien
tttacataaatattgacgcaaacatagtctctg

SEQ ID NO: 1072562 - DNA, 33 bp, Homo sapien
tttacataaatattgatgcaaacatagtctctg

SEQ ID NO: 1072563 - DNA, 33 bp, Homo sapien
cctagacacaccctgggccaagaaaagactcac

SEQ ID NO: 1072564 - DNA, 33 bp, Homo sapien
cctagacacaccctggtccaagaaaagactcac

SEQ ID NO: 1072565 - DNA, 33 bp, Homo sapien
ctccacctcctggtaaaacattcttaaacacac

SEQ ID NO: 1072566 - DNA, 33 bp, Homo sapien
ctccacctcctggtaagacattcttaaacacac

SEQ ID NO: 1072567 - DNA, 33 bp, Homo sapien
gacattgtaaaagttacagcttgaatgaaatcc

SEQ ID NO: 1072568 - DNA, 33 bp, Homo sapien
gacattgtaaaagttatagcttgaatgaaatcc

SEQ ID NO: 1072569 - DNA, 33 bp, Homo sapien
ccccaaaaaatactgagtaacagctaccaaatt

SEQ ID NO: 1072570 - DNA, 33 bp, Homo sapien
ccccaaaaaatactgattaacagctaccaaatt

SEQ ID NO: 1072571 - DNA, 33 bp, Homo sapien
agtgctctgctgatgaatatgtaggcaggtgta

SEQ ID NO: 1072572 - DNA, 33 bp, Homo sapien
agtgctctgctgatgagtatgtaggcaggtgta

SEQ ID NO: 1072573 - DNA, 33 bp, Homo sapien
acagatcctataacctaactctaatagtgctgg

SEQ ID NO: 1072574 - DNA, 33 bp, Homo sapien
acagatcctataacctgactctaatagtgctgg

SEQ ID NO: 1072575 - DNA, 33 bp, Homo sapien
tatccttgcatatctcaaaagagtccatgcttt

SEQ ID NO: 1072576 - DNA, 33 bp, Homo sapien
tatccttgcatatctcgaaagagtccatgcttt

SEQ ID NO: 1072577 - DNA, 33 bp, Homo sapien
ccagctctgctaatcccatggttgaggcacgag

SEQ ID NO: 1072578 - DNA, 33 bp, Homo sapien
ccagctctgctaatcctatggttgaggcacgag

SEQ ID NO: 1072579 - DNA, 33 bp, Homo sapien
aggtaagtttgtcaatgactcgtgcctcaacca

SEQ ID NO: 1072580 - DNA, 33 bp, Homo sapien
aggtaagtttgtcaattactcgtgcctcaacca

SEQ ID NO: 1072581 - DNA, 33 bp, Homo sapien
ctaatcaggtagaacgaccaacaattccacttt

SEQ ID NO: 1072582 - DNA, 33 bp, Homo sapien
ctaatcaggtagaacgtccaacaattccacttt

SEQ ID NO: 1072583 - DNA, 33 bp, Homo sapien
tgcaccatcacgcttcacaatttttaaaatttt

SEQ ID NO: 1072584 - DNA, 33 bp, Homo sapien
tgcaccatcacgcttcgcaatttttaaaatttt

SEQ ID NO: 1072585 - DNA, 33 bp, Homo sapien
gggtgctgtggtgaaaatgtacagataatctga

SEQ ID NO: 1072586 - DNA, 33 bp, Homo sapien
gggtgctgtggtgaaagtgtacagataatctga

SEQ ID NO: 1072587 - DNA, 33 bp, Homo sapien
tttctgttggaagtgaagtactcagattatgat

SEQ ID NO: 1072588 - DNA, 33 bp, Homo sapien
tttctgttggaagtgacgtactcagattatgat

SEQ ID NO: 1072589 - DNA, 33 bp, Homo sapien
caccatagatactgaaaaattagaaacattttg

SEQ ID NO: 1072590 - DNA, 33 bp, Homo sapien
caccatagatactgaacaattagaaacattttg

SEQ ID NO: 1072591 - DNA, 33 bp, Homo sapien
ctaaattgctaacaaccgacaaatcaggatgag

SEQ ID NO: 1072592 - DNA, 33 bp, Homo sapien
ctaaattgctaacaactgacaaatcaggatgag

SEQ ID NO: 1072593 - DNA, 33 bp, Homo sapien
gaacactgctggagttcaacaccaaaggctaaa

SEQ ID NO: 1072594 - DNA, 33 bp, Homo sapien
gaacactgctggagtttaacaccaaaggctaaa

SEQ ID NO: 1072595 - DNA, 33 bp, Homo sapien
actatagaattatacaacttctacgacaaaacc

SEQ ID NO: 1072596 - DNA, 33 bp, Homo sapien
actatagaattatacagcttctacgacaaaacc

SEQ ID NO: 1072597 - DNA, 33 bp, Homo sapien; identical to SEQ ID NO: 1072595

SEQ ID NO: 1072598 - DNA, 33 bp, Homo sapien; identical to SEQ ID NO: 1072596

SEQ ID NO: 1072599 - DNA, 33 bp, Homo sapien
cagagcttggagactacgttgctgaaataatac

SEQ ID NO: 1072600 - DNA, 33 bp, Homo sapien
cagagcttggagactatgttgctgaaataatac

SEQ ID NO: 1072601 - DNA, 33 bp, Homo sapien
aaggcctattttaatcactccttggctactgcc

SEQ ID NO: 1072602 - DNA, 33 bp, Homo sapien
aaggcctattttaatctctccttggctactgcc

SEQ ID NO: 1072603 - DNA, 33 bp, Homo sapien
agacacagaaactttacggaaaaatattgaata

SEQ ID NO: 1072604 - DNA, 33 bp, Homo sapien
agacacagaaactttatggaaaaatattgaata

SEQ ID NO: 1072605 - DNA, 33 bp, Homo sapien
aaagacacaatatttacgtatgatgtgaaaagt

SEQ ID NO: 1072606 - DNA, 33 bp, Homo sapien
aaagacacaatatttatgtatgatgtgaaaagt

SEQ ID NO: 1072607 - DNA, 33 bp, Homo sapien
aggatttaacaatgcaagaaagaagttgatgcc

SEQ ID NO: 1072608 - DNA, 33 bp, Homo sapien
aggatttaacaatgcaggaaagaagttgatgcc

SEQ ID NO: 1072609 - DNA, 33 bp, Homo sapien
aagaaatgatgaggaactggatagagaaagtaa

SEQ ID NO: 1072610 - DNA, 33 bp, Homo sapien
aagaaatgatgaggaattggatagagaaagtaa

SEQ ID NO: 1072611 - DNA, 33 bp, Homo sapien
gttgttcttacgttgccgatagagttgttagga

SEQ ID NO: 1072612 - DNA, 33 bp, Homo sapien
gttgttcttacgttgctgatagagttgttagga

SEQ ID NO: 1072613 - DNA, 33 bp, Homo sapien
ttacttaggacctagaagtgctttgtagcctct

SEQ ID NO: 1072614 - DNA, 33 bp, Homo sapien
ttacttaggacctagacgtgctttgtagcctct

SEQ ID NO: 1072615 - DNA, 33 bp, Homo sapien
gaccttgcagagtgaaaagctgagcaagtaaat

SEQ ID NO: 1072616 - DNA, 33 bp, Homo sapien
gaccttgcagagtgaacagctgagcaagtaaat

SEQ ID NO: 1072617 - DNA, 33 bp, Homo sapien
aaaggttaaggcttaacaagatactctgcattt

SEQ ID NO: 1072618 - DNA, 33 bp, Homo sapien
aaaggttaaggcttaataagatactctgcattt

SEQ ID NO: 1072619 - DNA, 33 bp, Homo sapien
atataagtatggtaccaagaagaaatatctgca

SEQ ID NO: 1072620 - DNA, 33 bp, Homo sapien
atataagtatggtacccagaagaaatatctgca

SEQ ID NO: 1072621 - DNA, 33 bp, Homo sapien
cacacaccaatatttcacaaaaattagattata

SEQ ID NO: 1072622 - DNA, 33 bp, Homo sapien
cacacaccaatatttcgcaaaaattagattata

SEQ ID NO: 1072623 - DNA, 33 bp, Homo sapien
taatgaaattaaaagtaacattcactgtgaacc

SEQ ID NO: 1072624 - DNA, 33 bp, Homo sapien
taatgaaattaaaagtgacattcactgtgaacc

SEQ ID NO: 1072625 - DNA, 33 bp, Homo sapien
cagtgttacaccttccagagatggagctccccg

SEQ ID NO: 1072626 - DNA, 33 bp, Homo sapien
cagtgttacaccttcctgagatggagctccccg

SEQ ID NO: 1072627 - DNA, 33 bp, Homo sapien
agagtggatgaaagaaaaattagtgtcatctag

SEQ ID NO: 1072628 - DNA, 33 bp, Homo sapien
agagtggatgaaagaagaattagtgtcatctag

SEQ ID NO: 1072629 - DNA, 33 bp, Homo sapien
tcctagttacatacaaactactatgagtctgaa

SEQ ID NO: 1072630 - DNA, 33 bp, Homo sapien
tcctagttacatacaacctactatgagtctgaa

SEQ ID NO: 1072631 - DNA, 33 bp, Homo sapien
ttctaatctggccggccaataaatgtagattac

SEQ ID NO: 1072632 - DNA, 33 bp, Homo sapien
ttctaatctggccggctaataaatgtagattac

SEQ ID NO: 1072633 - DNA, 33 bp, Homo sapien
agagaatgctgcctaacgcaaaatctttcttct

SEQ ID NO: 1072634 - DNA, 33 bp, Homo sapien
agagaatgctgcctaatgcaaaatctttcttct

SEQ ID NO: 1072635 - DNA, 33 bp, Homo sapien
gtcagttacagaatcaagttccttgtggtcgta

SEQ ID NO: 1072636 - DNA, 33 bp, Homo sapien
gtcagttacagaatcaggttccttgtggtcgta

SEQ ID NO: 1072637 - DNA, 33 bp, Homo sapien
tccagtagcatctcccaagtattgacaacgaaa

SEQ ID NO: 1072638 - DNA, 33 bp, Homo sapien
tccagtagcatctcccgagtattgacaacgaaa

SEQ ID NO: 1072639 - DNA, 33 bp, Homo sapien
ctcggaagtagttgaccggcctctgtgaaggtt

SEQ ID NO: 1072640 - DNA, 33 bp, Homo sapien
ctcggaagtagttgactggcctctgtgaaggtt

SEQ ID NO: 1072641 - DNA, 33 bp, Homo sapien
ataaattaagttgtccagattgataacaagaat

SEQ ID NO: 1072642 - DNA, 33 bp, Homo sapien
ataaattaagttgtccggattgataacaagaat

SEQ ID NO: 1072643 - DNA, 33 bp, Homo sapien
tggggacaaacattgaaactatccgatggaagt

SEQ ID NO: 1072644 - DNA, 33 bp, Homo sapien
tggggacaaacattgagactatccgatggaagt

SEQ ID NO: 1072645 - DNA, 33 bp, Homo sapien
tttatatattctggtcaataattccttgtgagg

SEQ ID NO: 1072646 - DNA, 33 bp, Homo sapien
tttatatattctggtcgataattccttgtgagg

SEQ ID NO: 1072647 - DNA, 33 bp, Homo sapien
atcctcatgggttctcaaactaattcctctccc

SEQ ID NO: 1072648 - DNA, 33 bp, Homo sapien
atcctcatgggttctcgaactaattcctctccc

SEQ ID NO: 1072649 - DNA, 33 bp, Homo sapien
ttgaacaacatatggactcattgacttcatttc

SEQ ID NO: 1072650 - DNA, 33 bp, Homo sapien
ttgaacaacatatggattcattgacttcatttc

SEQ ID NO: 1072651 - DNA, 33 bp, Homo sapien
atagatgtggcttttaaaaattaatctctgtgt

SEQ ID NO: 1072652 - DNA, 33 bp, Homo sapien
atagatgtggcttttataaattaatctctgtgt

SEQ ID NO: 1072653 - DNA, 33 bp, Homo sapien
ttctacaaccttcctgaacttggatattaatat

SEQ ID NO: 1072654 - DNA, 33 bp, Homo sapien
ttctacaaccttcctgtacttggatattaatat

SEQ ID NO: 1072655 - DNA, 33 bp, Homo sapien
acaatatatgtgtgtacaactggtaaaatataa

SEQ ID NO: 1072656 - DNA, 33 bp, Homo sapien
acaatatatgtgtgtataactggtaaaatataa

SEQ ID NO: 1072657 - DNA, 33 bp, Homo sapien
aagatgaacaaagtccaccttcatctgcaaata

SEQ ID NO: 1072658 - DNA, 33 bp, Homo sapien
aagatgaacaaagtccgccttcatctgcaaata

SEQ ID NO: 1072659 - DNA, 33 bp, Homo sapien
catgaaaggcgtaacaatgtgaggtatagataa

SEQ ID NO: 1072660 - DNA, 33 bp, Homo sapien
catgaaaggcgtaacagtgtgaggtatagataa

SEQ ID NO: 1072661 - DNA, 33 bp, Homo sapien
atttggttcccaaaaactggatctcctggagac

SEQ ID NO: 1072662 - DNA, 33 bp, Homo sapien
atttggttcccaaaaattggatctcctggagac

SEQ ID NO: 1072663 - DNA, 33 bp, Homo sapien
tcagccaagatacatacataaaagttatccaaa

SEQ ID NO: 1072664 - DNA, 33 bp, Homo sapien
tcagccaagatacatagataaaagttatccaaa

SEQ ID NO: 1072665 - DNA, 33 bp, Homo sapien
tatgacctgaggacaacttccggtaaatatcca

SEQ ID NO: 1072666 - DNA, 33 bp, Homo sapien
tatgacctgaggacaatttccggtaaatatcca

SEQ ID NO: 1072667 - DNA, 33 bp, Homo sapien
tcttaggatttatacactggctgtactctctat

SEQ ID NO: 1072668 - DNA, 33 bp, Homo sapien
tcttaggatttatacagtggctgtactctctat

SEQ ID NO: 1072669 - DNA, 33 bp, Homo sapien
caacatagcaaatctaaaacaatattggatccc

SEQ ID NO: 1072670 - DNA, 33 bp, Homo sapien
caacatagcaaatctacaacaatattggatccc

SEQ ID NO: 1072671 - DNA, 33 bp, Homo sapien
aagagcacaagaaagaagttgaatctgaactgg

SEQ ID NO: 1072672 - DNA, 33 bp, Homo sapien
aagagcacaagaaagaggttgaatctgaactgg

SEQ ID NO: 1072673 - DNA, 33 bp, Homo sapien
tgagagattggatttacagtacatggcagaata

SEQ ID NO: 1072674 - DNA, 33 bp, Homo sapien
tgagagattggatttatagtacatggcagaata

SEQ ID NO: 1072675 - DNA, 33 bp, Homo sapien
agaacagaggttttcaaattggacatgactgac

SEQ ID NO: 1072676 - DNA, 33 bp, Homo sapien
agaacagaggttttcagattggacatgactgac

SEQ ID NO: 1072677 - DNA, 33 bp, Homo sapien
ttggcacttgctatataaatgacaataggcatg

SEQ ID NO: 1072678 - DNA, 33 bp, Homo sapien
ttggcacttgctatatgaatgacaataggcatg

SEQ ID NO: 1072679 - DNA, 33 bp, Homo sapien
tcaaaactattaatacaaacatatttgaggcgg

SEQ ID NO: 1072680 - DNA, 33 bp, Homo sapien
tcaaaactattaatacgaacatatttgaggcgg

SEQ ID NO: 1072681 - DNA, 33 bp, Homo sapien
gaatgtcctatgacaacgactgtgccatggctc

SEQ ID NO: 1072682 - DNA, 33 bp, Homo sapien
gaatgtcctatgacaatgactgtgccatggctc

SEQ ID NO: 1072683 - DNA, 33 bp, Homo sapien
gggaggagcaggctgacacaaaaaacagcacca

SEQ ID NO: 1072684 - DNA, 33 bp, Homo sapien
gggaggagcaggctgatacaaaaaacagcacca

SEQ ID NO: 1072685 - DNA, 33 bp, Homo sapien
gtaatcaattgctgcaaattccactttctagtt

SEQ ID NO: 1072686 - DNA, 33 bp, Homo sapien
gtaatcaattgctgcagattccactttctagtt

SEQ ID NO: 1072687 - DNA, 33 bp, Homo sapien
cttgcagatttctcaccgagattcatcccacta

SEQ ID NO: 1072688 - DNA, 33 bp, Homo sapien
cttgcagatttctcactgagattcatcccacta

SEQ ID NO: 1072689 - DNA, 33 bp, Homo sapien
acacgttgcccattagccaaagcaagtcacatg

SEQ ID NO: 1072690 - DNA, 33 bp, Homo sapien
acacgttgcccattagtcaaagcaagtcacatg

SEQ ID NO: 1072691 - DNA, 33 bp, Homo sapien
gttttaatgtaccttaaacagtaacagataact

SEQ ID NO: 1072692 - DNA, 33 bp, Homo sapien
gttttaatgtaccttacacagtaacagataact

SEQ ID NO: 1072693 - DNA, 33 bp, Homo sapien
ttcagtacttttctaccgctagcctttttcctc

SEQ ID NO: 1072694 - DNA, 33 bp, Homo sapien
ttcagtacttttctactgctagcctttttcctc

SEQ ID NO: 1072695 - DNA, 33 bp, Homo sapien
gaactaaccaactctcgaatatctctgaaaagc

SEQ ID NO: 1072696 - DNA, 33 bp, Homo sapien
gaactaaccaactctctaatatctctgaaaagc

SEQ ID NO: 1072697 - DNA, 33 bp, Homo sapien
acaatgacttctctaacgtttatctctggggga

SEQ ID NO: 1072698 - DNA, 33 bp, Homo sapien
acaatgacttctctaaggtttatctctggggga

SEQ ID NO: 1072699 - DNA, 33 bp, Homo sapien
cctccagttccttagaagtactcgtgactttgg

SEQ ID NO: 1072700 - DNA, 33 bp, Homo sapien
cctccagttccttagacgtactcgtgactttgg

SEQ ID NO: 1072701 - DNA, 33 bp, Homo sapien
cacagcggccagtaagaacactgttccaaaaac

SEQ ID NO: 1072702 - DNA, 33 bp, Homo sapien
cacagcggccagtaaggacactgttccaaaaac

SEQ ID NO: 1072703 - DNA, 33 bp, Homo sapien
taatgggacatttgtcaaatccaagaaaccaac

SEQ ID NO: 1072704 - DNA, 33 bp, Homo sapien
taatgggacatttgtcgaatccaagaaaccaac

SEQ ID NO: 1072705 - DNA, 33 bp, Homo sapien
ttcctaaaagagatgaaggttaagttgaaaaaa

SEQ ID NO: 1072706 - DNA, 33 bp, Homo sapien
ttcctaaaagagatgacggttaagttgaaaaaa

SEQ ID NO: 1072707 - DNA, 33 bp, Homo sapien
aaaccgtggtcctttaagaagctctatatggct

SEQ ID NO: 1072708 - DNA, 33 bp, Homo sapien
aaaccgtggtcctttaggaagctctatatggct

SEQ ID NO: 1072709 - DNA, 33 bp, Homo sapien
atatgctttatatgcaacttgagtaccacctat

SEQ ID NO: 1072710 - DNA, 33 bp, Homo sapien
atatgctttatatgcaccttgagtaccacctat

SEQ ID NO: 1072711 - DNA, 33 bp, Homo sapien
cacctataattcctcaaagaacagctctccttt

SEQ ID NO: 1072712 - DNA, 33 bp, Homo sapien
cacctataattcctcatagaacagctctccttt

SEQ ID NO: 1072713 - DNA, 33 bp, Homo sapien
tagctcacttcgttaactatgcttagaggttga

SEQ ID NO: 1072714 - DNA, 33 bp, Homo sapien
tagctcacttcgttaattatgcttagaggttga

SEQ ID NO: 1072715 - DNA, 33 bp, Homo sapien
agacataaactaatgcactttgtatgtttattg

SEQ ID NO: 1072716 - DNA, 33 bp, Homo sapien
agacataaactaatgcgctttgtatgtttattg

SEQ ID NO: 1072717 - DNA, 33 bp, Homo sapien
tgtggcttacccttgcaaaacagattcactaag

SEQ ID NO: 1072718 - DNA, 33 bp, Homo sapien
tgtggcttacccttgcgaaacagattcactaag

SEQ ID NO: 1072719 - DNA, 33 bp, Homo sapien
tcactgtgagcctccacgactcagttattaatt

SEQ ID NO: 1072720 - DNA, 33 bp, Homo sapien
tcactgtgagcctccatgactcagttattaatt

SEQ ID NO: 1072721 - DNA, 33 bp, Homo sapien
aactggggttaatgaaatcttgatctagaatat

SEQ ID NO: 1072722 - DNA, 33 bp, Homo sapien
aactggggttaatgaagtcttgatctagaatat

SEQ ID NO: 1072723 - DNA, 33 bp, Homo sapien
aattttttgctgagaacgtttgttgtggacatg

SEQ ID NO: 1072724 - DNA, 33 bp, Homo sapien
aattttttgctgagaatgtttgttgtggacatg

SEQ ID NO: 1072725 - DNA, 33 bp, Homo sapien
ttttctctggaaatcaacaggtaaaacgtatga

SEQ ID NO: 1072726 - DNA, 33 bp, Homo sapien
ttttctctggaaatcagcaggtaaaacgtatga

SEQ ID NO: 1072727 - DNA, 33 bp, Homo sapien
cccaattgatagctccacataagtatgggagac

SEQ ID NO: 1072728 - DNA, 33 bp, Homo sapien
cccaattgatagctcctcataagtatgggagac

SEQ ID NO: 1072729 - DNA, 33 bp, Homo sapien
gggttgccatattaccaatcattcaaaaagtat

SEQ ID NO: 1072730 - DNA, 33 bp, Homo sapien
gggttgccatattaccgatcattcaaaaagtat

SEQ ID NO: 1072731 - DNA, 33 bp, Homo sapien
tacaataatgatttaccgagagctgtgtagagc

SEQ ID NO: 1072732 - DNA, 33 bp, Homo sapien
tacaataatgatttactgagagctgtgtagagc

SEQ ID NO: 1072733 - DNA, 33 bp, Homo sapien
gagacagagaaattgaaggacttcgtaggagca

SEQ ID NO: 1072734 - DNA, 33 bp, Homo sapien
gagacagagaaattgagggacttcgtaggagca

SEQ ID NO: 1072735 - DNA, 33 bp, Homo sapien
cttatgacaaactgcacatttgtagacgagtct

SEQ ID NO: 1072736 - DNA, 33 bp, Homo sapien
cttatgacaaactgcatatttgtagacgagtct

SEQ ID NO: 1072737 - DNA, 33 bp, Homo sapien
tcaaggccttgcaaaaaattacctgagggccca

SEQ ID NO: 1072738 - DNA, 33 bp, Homo sapien
tcaaggccttgcaaaatattacctgagggccca

SEQ ID NO: 1072739 - DNA, 33 bp, Homo sapien
cgttttgctacaggaaagctaagaaaatacatt

SEQ ID NO: 1072740 - DNA, 33 bp, Homo sapien
cgttttgctacaggaaggctaagaaaatacatt

SEQ ID NO: 1072741 - DNA, 33 bp, Homo sapien; identical to SEQ ID NO: 1072739

SEQ ID NO: 1072742 - DNA, 33 bp, Homo sapien; identical to SEQ ID NO: 1072740

SEQ ID NO: 1072743 - DNA, 33 bp, Homo sapien
ttctctgtacagcagcacttgtagattctagtt

SEQ ID NO: 1072744 - DNA, 33 bp, Homo sapien
ttctctgtacagcagctcttgtagattctagtt

SEQ ID NO: 1072745 - DNA, 33 bp, Homo sapien
cacatagaccactggaacataataaagagccca

SEQ ID NO: 1072746 - DNA, 33 bp, Homo sapien
cacatagaccactggaccataataaagagccca

SEQ ID NO: 1072747 - DNA, 33 bp, Homo sapien
tcatgtctttttgttcgccattgaatcatcaat

SEQ ID NO: 1072748 - DNA, 33 bp, Homo sapien
tcatgtctttttgttctccattgaatcatcaat

SEQ ID NO: 1072749 - DNA, 33 bp, Homo sapien
tagctaagaatgtataaccacataacaaagtac

SEQ ID NO: 1072750 - DNA, 33 bp, Homo sapien
tagctaagaatgtatagccacataacaaagtac

SEQ ID NO: 1072751 - DNA, 33 bp, Homo sapien
ggaactatgtcagacacgaaactgaaaataact

SEQ ID NO: 1072752 - DNA, 33 bp, Homo sapien
ggaactatgtcagacatgaaactgaaaataact

SEQ ID NO: 1072753 - DNA, 33 bp, Homo sapien
ccttaaaagtatagcacggcttgacagaagtca

SEQ ID NO: 1072754 - DNA, 33 bp, Homo sapien
ccttaaaagtatagcatggcttgacagaagtca

SEQ ID NO: 1072755 - DNA, 33 bp, Homo sapien
tttgcctgtagatagacagttatattggcacaa

SEQ ID NO: 1072756 - DNA, 33 bp, Homo sapien
tttgcctgtagatagagagttatattggcacaa

SEQ ID NO: 1072757 - DNA, 33 bp, Homo sapien
ttagttttcttactacggattcaatttcagagc

SEQ ID NO: 1072758 - DNA, 33 bp, Homo sapien
ttagttttcttactactgattcaatttcagagc

SEQ ID NO: 1072759 - DNA, 33 bp, Homo sapien
cagaaatggtacattcaccagcagttttgccag

SEQ ID NO: 1072760 - DNA, 33 bp, Homo sapien
cagaaatggtacattcgccagcagttttgccag

SEQ ID NO: 1072761 - DNA, 33 bp, Homo sapien; identical to SEQ ID NO: 1072759

SEQ ID NO: 1072762 - DNA, 33 bp, Homo sapien; identical to SEQ ID NO: 1072760

SEQ ID NO: 1072763 - DNA, 33 bp, Homo sapien
ccaacattaggctgacacgcgtggatgtaggtt

SEQ ID NO: 1072764 - DNA, 33 bp, Homo sapien
ccaacattaggctgacccgcgtggatgtaggtt

SEQ ID NO: 1072765 - DNA, 33 bp, Homo sapien
agccattggaaagctaagacacaaatacatata

SEQ ID NO: 1072766 - DNA, 33 bp, Homo sapien
agccattggaaagctaggacacaaatacatata

SEQ ID NO: 1072767 - DNA, 33 bp, Homo sapien
aaatgacaaaatcagaacttgactccaagtatc

SEQ ID NO: 1072768 - DNA, 33 bp, Homo sapien
aaatgacaaaatcagatcttgactccaagtatc

SEQ ID NO: 1072769 - DNA, 33 bp, Homo sapien
tgctaagaactgtgatcatcacaacatttaaaa

SEQ ID NO: 1072770 - DNA, 33 bp, Homo sapien
tgctaagaactgtgatgatcacaacatttaaaa

SEQ ID NO: 1072771 - DNA, 33 bp, Homo sapien
tctagatgttgttgtaccatcttctaaacccaa

SEQ ID NO: 1072772 - DNA, 33 bp, Homo sapien
tctagatgttgttgtatcatcttctaaacccaa

SEQ ID NO: 1072773 - DNA, 33 bp, Homo sapien
cagttctaggataattaaagcatcaaaataaat

SEQ ID NO: 1072774 - DNA, 33 bp, Homo sapien
cagttctaggataatttaagcatcaaaataaat

SEQ ID NO: 1072775 - DNA, 33 bp, Homo sapien
gatatctgtactttcaagtttattgcagaacta

SEQ ID NO: 1072776 - DNA, 33 bp, Homo sapien
gatatctgtactttcatgtttattgcagaacta

SEQ ID NO: 1072777 - DNA, 33 bp, Homo sapien
tctctagacttgaacacgaataagaatagtttg

SEQ ID NO: 1072778 - DNA, 33 bp, Homo sapien
tctctagacttgaacatgaataagaatagtttg

SEQ ID NO: 1072779 - DNA, 33 bp, Homo sapien
atattgattggatttaaaagttgtccttgaata

SEQ ID NO: 1072780 - DNA, 33 bp, Homo sapien
atattgattggatttataagttgtccttgaata

SEQ ID NO: 1072781 - DNA, 33 bp, Homo sapien
ctcacacagtcttaacaacaactaataatttga

SEQ ID NO: 1072782 - DNA, 33 bp, Homo sapien
ctcacacagtcttaacgacaactaataatttga

SEQ ID NO: 1072783 - DNA, 33 bp, Homo sapien
aatgaggatttccatacagagctaggcagctcc

SEQ ID NO: 1072784 - DNA, 33 bp, Homo sapien
aatgaggatttccatagagagctaggcagctcc

SEQ ID NO: 1072785 - DNA, 33 bp, Homo sapien
tccccattcggtctataagtcttccaattacca

SEQ ID NO: 1072786 - DNA, 33 bp, Homo sapien
tccccattcggtctatcagtcttccaattacca

SEQ ID NO: 1072787 - DNA, 33 bp, Homo sapien
gatttgaactttattgcatatgtgatggaagga

SEQ ID NO: 1072788 - DNA, 33 bp, Homo sapien
gatttgaactttattgtatatgtgatggaagga

SEQ ID NO: 1072789 - DNA, 33 bp, Homo sapien
ttatcacgtctttcctcaagctcttatagctgt

SEQ ID NO: 1072790 - DNA, 33 bp, Homo sapien
ttatcacgtctttccttaagctcttatagctgt

SEQ ID NO: 1072791 - DNA, 33 bp, Homo sapien
ggctcttccaagattcaaggttagatccttcca

SEQ ID NO: 1072792 - DNA, 33 bp, Homo sapien
ggctcttccaagattcgaggttagatccttcca

SEQ ID NO: 1072793 - DNA, 33 bp, Homo sapien
tgcaacttcattaagaaagcacaaacaaaaaca

SEQ ID NO: 1072794 - DNA, 33 bp, Homo sapien
tgcaacttcattaagagagcacaaacaaaaaca

SEQ ID NO: 1072795 - DNA, 33 bp, Homo sapien
ctgtggtcaagcgtcaactgagtttggtcgagt

SEQ ID NO: 1072796 - DNA, 33 bp, Homo sapien
ctgtggtcaagcgtcagctgagtttggtcgagt

SEQ ID NO: 1072797 - DNA, 33 bp, Homo sapien
gatgacatgagcctaggccccaaatgaaggaag

SEQ ID NO: 1072798 - DNA, 33 bp, Homo sapien
gatgacatgagcctagtccccaaatgaaggaag

SEQ ID NO: 1072799 - DNA, 33 bp, Homo sapien
actgggtttgagtttccactactcaagagctgt

SEQ ID NO: 1072800 - DNA, 33 bp, Homo sapien
actgggtttgagtttctactactcaagagctgt

SEQ ID NO: 1072801 - DNA, 33 bp, Homo sapien
gcaaatcaaagtgacaatgagttagtatactct

SEQ ID NO: 1072802 - DNA, 33 bp, Homo sapien
gcaaatcaaagtgacagtgagttagtatactct

SEQ ID NO: 1072803 - DNA, 33 bp, Homo sapien
gccaaatccaggcttagatgttacaaaattgca

SEQ ID NO: 1072804 - DNA, 33 bp, Homo sapien
gccaaatccaggcttatatgttacaaaattgca

SEQ ID NO: 1072805 - DNA, 33 bp, Homo sapien
cacagcaagatgaagcccttcgaccaaagtcac

SEQ ID NO: 1072806 - DNA, 33 bp, Homo sapien
cacagcaagatgaagctcttcgaccaaagtcac

SEQ ID NO: 1072807 - DNA, 33 bp, Homo sapien
gaaatgctttcactgacaacgatgtagtaaaaa

SEQ ID NO: 1072808 - DNA, 33 bp, Homo sapien
gaaatgctttcactgataacgatgtagtaaaaa

SEQ ID NO: 1072809 - DNA, 33 bp, Homo sapien
aactcgcctaggtaaaagaaaggactactcaag

SEQ ID NO: 1072810 - DNA, 33 bp, Homo sapien
aactcgcctaggtaaaggaaaggactactcaag

SEQ ID NO: 1072811 - DNA, 33 bp, Homo sapien
gctccaagttctgctcactgagaagattgtccc

SEQ ID NO: 1072812 - DNA, 33 bp, Homo sapien
gctccaagttctgctcgctgagaagattgtccc

SEQ ID NO: 1072813 - DNA, 33 bp, Homo sapien
gtttattactactataaccatcattcaagaaag

SEQ ID NO: 1072814 - DNA, 33 bp, Homo sapien
gtttattactactatagccatcattcaagaaag

SEQ ID NO: 1072815 - DNA, 33 bp, Homo sapien
ctaaggctatctataaataaggaatctcacaga

SEQ ID NO: 1072816 - DNA, 33 bp, Homo sapien
ctaaggctatctataagtaaggaatctcacaga

SEQ ID NO: 1072817 - DNA, 33 bp, Homo sapien
ctaagtttctaggtaaaaacaagcatgatgaat

SEQ ID NO: 1072818 - DNA, 33 bp, Homo sapien
ctaagtttctaggtaacaacaagcatgatgaat

SEQ ID NO: 1072819 - DNA, 33 bp, Homo sapien
gcaaaccagatccaaaagcataatcaaaaaaat

SEQ ID NO: 1072820 - DNA, 33 bp, Homo sapien
gcaaaccagatccaaaggcataatcaaaaaaat

SEQ ID NO: 1072821 - DNA, 33 bp, Homo sapien
gcaaattagtaccacaatgaaataccaccttac

SEQ ID NO: 1072822 - DNA, 33 bp, Homo sapien
gcaaattagtaccacagtgaaataccaccttac

SEQ ID NO: 1072823 - DNA, 33 bp, Homo sapien
taactgtgtccctgacaaaattaattgagtaac

SEQ ID NO: 1072824 - DNA, 33 bp, Homo sapien
taactgtgtccctgactaaattaattgagtaac

SEQ ID NO: 1072825 - DNA, 33 bp, Homo sapien
gagcaacatttcaaagactctgaatcaggcagg

SEQ ID NO: 1072826 - DNA, 33 bp, Homo sapien
gagcaacatttcaaaggctctgaatcaggcagg

SEQ ID NO: 1072827 - DNA, 33 bp, Homo sapien
tattactatattgccaaataaaaagtcacactg

SEQ ID NO: 1072828 - DNA, 33 bp, Homo sapien
tattactatattgccagataaaaagtcacactg

SEQ ID NO: 1072829 - DNA, 33 bp, Homo sapien
attatgcactgtgtaaactgcataagaaccgca

SEQ ID NO: 1072830 - DNA, 33 bp, Homo sapien
attatgcactgtgtaagctgcataagaaccgca

SEQ ID NO: 1072831 - DNA, 33 bp, Homo sapien
gatgacaatacacacaagattaattttaatttt

SEQ ID NO: 1072832 - DNA, 33 bp, Homo sapien
gatgacaatacacacatgattaattttaatttt

SEQ ID NO: 1072833 - DNA, 33 bp, Homo sapien
cagaatgagtatttcaacacactaagggttcta

SEQ ID NO: 1072834 - DNA, 33 bp, Homo sapien
cagaatgagtatttcagcacactaagggttcta

SEQ ID NO: 1072835 - DNA, 33 bp, Homo sapien
acctaatatttgaacccgacttttgtgtaaatc

SEQ ID NO: 1072836 - DNA, 33 bp, Homo sapien
acctaatatttgaacctgacttttgtgtaaatc

SEQ ID NO: 1072837 - DNA, 33 bp, Homo sapien
gataaaataggcataaacatgaaacaggaacaa

SEQ ID NO: 1072838 - DNA, 33 bp, Homo sapien
gataaaataggcataaccatgaaacaggaacaa

SEQ ID NO: 1072839 - DNA, 33 bp, Homo sapien
ttgaggacctttcataagcagaggtgacaattc

SEQ ID NO: 1072840 - DNA, 33 bp, Homo sapien
ttgaggacctttcatatgcagaggtgacaattc

SEQ ID NO: 1072841 - DNA, 33 bp, Homo sapien
tatctgctgaagctacaggattcatggacagta

SEQ ID NO: 1072842 - DNA, 33 bp, Homo sapien
tatctgctgaagctacgggattcatggacagta

SEQ ID NO: 1072843 - DNA, 33 bp, Homo sapien
tctgtaaaatgggggaaatagtagcacttatta

SEQ ID NO: 1072844 - DNA, 33 bp, Homo sapien
tctgtaaaatgggggacatagtagcacttatta

SEQ ID NO: 1072845 - DNA, 33 bp, Homo sapien
cttttgactggatatagacatttgagtggttat

SEQ ID NO: 1072846 - DNA, 33 bp, Homo sapien
cttttgactggatatatacatttgagtggttat

SEQ ID NO: 1072847 - DNA, 33 bp, Homo sapien
cttcatctgactatacagcaaaattaataattc

SEQ ID NO: 1072848 - DNA, 33 bp, Homo sapien
cttcatctgactatacggcaaaattaataattc

SEQ ID NO: 1072849 - DNA, 33 bp, Homo sapien
atgcctgtggtgttcaataaaactgaaatcacg

SEQ ID NO: 1072850 - DNA, 33 bp, Homo sapien
atgcctgtggtgttcattaaaactgaaatcacg

SEQ ID NO: 1072851 - DNA, 33 bp, Homo sapien
tttctccccttgggaactggatgaagacagtat

SEQ ID NO: 1072852 - DNA, 33 bp, Homo sapien
tttctccccttgggaattggatgaagacagtat

SEQ ID NO: 1072853 - DNA, 33 bp, Homo sapien
ctcctcacttcagtccacaaatttcaaagcccc

SEQ ID NO: 1072854 - DNA, 33 bp, Homo sapien
ctcctcacttcagtccgcaaatttcaaagcccc

SEQ ID NO: 1072855 - DNA, 33 bp, Homo sapien
tctctgaatcaaataaatgtctcactgtgcagg

SEQ ID NO: 1072856 - DNA, 33 bp, Homo sapien
tctctgaatcaaataagtgtctcactgtgcagg

SEQ ID NO: 1072857 - DNA, 33 bp, Homo sapien
ggtttctcggtttccaatctctcatctagcata

SEQ ID NO: 1072858 - DNA, 33 bp, Homo sapien
ggtttctcggtttccagtctctcatctagcata

SEQ ID NO: 1072859 - DNA, 33 bp, Homo sapien
agtttattctactccgaatatctcactgaacaa

SEQ ID NO: 1072860 - DNA, 33 bp, Homo sapien
agtttattctactccggatatctcactgaacaa

SEQ ID NO: 1072861 - DNA, 33 bp, Homo sapien
tctctgcgaccatgaaatagatttgtgaaagga

SEQ ID NO: 1072862 - DNA, 33 bp, Homo sapien
tctctgcgaccatgaattagatttgtgaaagga

SEQ ID NO: 1072863 - DNA, 33 bp, Homo sapien
tgcttcctttggaaaacctagtaaaagactcaa

SEQ ID NO: 1072864 - DNA, 33 bp, Homo sapien
tgcttcctttggaaaagctagtaaaagactcaa

SEQ ID NO: 1072865 - DNA, 33 bp, Homo sapien
ggtaaatagttcagggaagtaaatgcttcatat

SEQ ID NO: 1072866 - DNA, 33 bp, Homo sapien
ggtaaatagttcagggcagtaaatgcttcatat

SEQ ID NO: 1072867 - DNA, 33 bp, Homo sapien
ccacaaatcctttcacaaccaaaacttaacaga

SEQ ID NO: 1072868 - DNA, 33 bp, Homo sapien
ccacaaatcctttcacgaccaaaacttaacaga

SEQ ID NO: 1072869 - DNA, 33 bp, Homo sapien
accttctctaatatcacgtgtcagtttagagcc

SEQ ID NO: 1072870 - DNA, 33 bp, Homo sapien
accttctctaatatcatgtgtcagtttagagcc

SEQ ID NO: 1072871 - DNA, 33 bp, Homo sapien
atttctgatcagggagcagggataaaacttata

SEQ ID NO: 1072872 - DNA, 33 bp, Homo sapien
atttctgatcagggaggagggataaaacttata

SEQ ID NO: 1072873 - DNA, 33 bp, Homo sapien
aggccaatcgaacccacataattctgagactag

SEQ ID NO: 1072874 - DNA, 33 bp, Homo sapien
aggccaatcgaacccatataattctgagactag

SEQ ID NO: 1072875 - DNA, 33 bp, Homo sapien
gaccaaatggtgactcaatcaaaaataagaact

SEQ ID NO: 1072876 - DNA, 33 bp, Homo sapien
gaccaaatggtgactcgatcaaaaataagaact

SEQ ID NO: 1072877 - DNA, 33 bp, Homo sapien
ataatcagccatgctacgattatacttgtacct

SEQ ID NO: 1072878 - DNA, 33 bp, Homo sapien
ataatcagccatgctaggattatacttgtacct

SEQ ID NO: 1072879 - DNA, 33 bp, Homo sapien
tcaattctcaccattacgagtactgaattttgc

SEQ ID NO: 1072880 - DNA, 33 bp, Homo sapien
tcaattctcaccattatgagtactgaattttgc

SEQ ID NO: 1072881 - DNA, 33 bp, Homo sapien
gagtgattcttctttgaatgacagtccattatt

SEQ ID NO: 1072882 - DNA, 33 bp, Homo sapien
gagtgattcttctttggatgacagtccattatt

SEQ ID NO: 1072883 - DNA, 33 bp, Homo sapien
tcgtactgcactttaactgaggactttcctggt

SEQ ID NO: 1072884 - DNA, 33 bp, Homo sapien
tcgtactgcactttaattgaggactttcctggt

SEQ ID NO: 1072885 - DNA, 33 bp, Homo sapien
caaaatgttcccacacgctaccttaacgataag

SEQ ID NO: 1072886 - DNA, 33 bp, Homo sapien
caaaatgttcccacactctaccttaacgataag

SEQ ID NO: 1072887 - DNA, 33 bp, Homo sapien
tcagtcatcatattagcataggcagaaaagatg

SEQ ID NO: 1072888 - DNA, 33 bp, Homo sapien
tcagtcatcatattagtataggcagaaaagatg

SEQ ID NO: 1072889 - DNA, 33 bp, Homo sapien
aattagcacataattaacagcttaaaacagcac

SEQ ID NO: 1072890 - DNA, 33 bp, Homo sapien
aattagcacataattagcagcttaaaacagcac

SEQ ID NO: 1072891 - DNA, 33 bp, Homo sapien
gctaatttgtcagacaatgatataaaactaaca

SEQ ID NO: 1072892 - DNA, 33 bp, Homo sapien
gctaatttgtcagacagtgatataaaactaaca

SEQ ID NO: 1072893 - DNA, 33 bp, Homo sapien
ttcaagagaaagatatcaggagaagaaactcta

SEQ ID NO: 1072894 - DNA, 33 bp, Homo sapien
ttcaagagaaagatattaggagaagaaactcta

SEQ ID NO: 1072895 - DNA, 33 bp, Homo sapien
tgtaagaggcaatctacagtcactcctgagttc

SEQ ID NO: 1072896 - DNA, 33 bp, Homo sapien
tgtaagaggcaatctatagtcactcctgagttc

SEQ ID NO: 1072897 - DNA, 33 bp, Homo sapien
acacaaaagccagtgacgctgctaatccttcta

SEQ ID NO: 1072898 - DNA, 33 bp, Homo sapien
acacaaaagccagtgatgctgctaatccttcta

SEQ ID NO: 1072899 - DNA, 33 bp, Homo sapien
ggagacacactaagcgaccgaggtgtgtctgta

SEQ ID NO: 1072900 - DNA, 33 bp, Homo sapien
ggagacacactaagcggccgaggtgtgtctgta

SEQ ID NO: 1072901 - DNA, 33 bp, Homo sapien
acatacatctacaccaaagccaattgtttttta

SEQ ID NO: 1072902 - DNA, 33 bp, Homo sapien
acatacatctacaccagagccaattgtttttta

SEQ ID NO: 1072903 - DNA, 33 bp, Homo sapien
tgccctatgaaggctacgtgaataaactgaata

SEQ ID NO: 1072904 - DNA, 33 bp, Homo sapien
tgccctatgaaggctatgtgaataaactgaata

SEQ ID NO: 1072905 - DNA, 33 bp, Homo sapien
aatcttggaaggggtgaaaaatgttcctcatcc

SEQ ID NO: 1072906 - DNA, 33 bp, Homo sapien
aatcttggaaggggtggaaaatgttcctcatcc

SEQ ID NO: 1072907 - DNA, 33 bp, Homo sapien
ttccagctcacaaagacactaccaggcagacaa

SEQ ID NO: 1072908 - DNA, 33 bp, Homo sapien
ttccagctcacaaagagactaccaggcagacaa

SEQ ID NO: 1072909 - DNA, 33 bp, Homo sapien
ttgtgatttacaaagaaatgaggaaaatggctt

SEQ ID NO: 1072910 - DNA, 33 bp, Homo sapien
ttgtgatttacaaagacatgaggaaaatggctt

SEQ ID NO: 1072911 - DNA, 33 bp, Homo sapien
atctaggtagaccacagtatcacatttcaggga

SEQ ID NO: 1072912 - DNA, 33 bp, Homo sapien
atctaggtagaccacattatcacatttcaggga

SEQ ID NO: 1072913 - DNA, 33 bp, Homo sapien
tttggaggaatcaacgaagccttcagggaagaa

SEQ ID NO: 1072914 - DNA, 33 bp, Homo sapien
tttggaggaatcaacgcagccttcagggaagaa

SEQ ID NO: 1072915 - DNA, 33 bp, Homo sapien
ttgatttgggaagacacgtaacgcttctgattt

SEQ ID NO: 1072916 - DNA, 33 bp, Homo sapien
ttgatttgggaagacatgtaacgcttctgattt

SEQ ID NO: 1072917 - DNA, 33 bp, Homo sapien
actagaagtagcgtcaatagcatctcctacctg

SEQ ID NO: 1072918 - DNA, 33 bp, Homo sapien
actagaagtagcgtcagtagcatctcctacctg

SEQ ID NO: 1072919 - DNA, 33 bp, Homo sapien
tatgttcattgtattacataacactgcctttcc

SEQ ID NO: 1072920 - DNA, 33 bp, Homo sapien
tatgttcattgtattatataacactgcctttcc

SEQ ID NO: 1072921 - DNA, 33 bp, Homo sapien
aaaaacaagtgatcggaaaatgttaataattat

SEQ ID NO: 1072922 - DNA, 33 bp, Homo sapien
aaaaacaagtgatcgggaaatgttaataattat

SEQ ID NO: 1072923 - DNA, 33 bp, Homo sapien
aatatattgtattctcaaaaaatgttaagagag

SEQ ID NO: 1072924 - DNA, 33 bp, Homo sapien
aatatattgtattctcgaaaaatgttaagagag

SEQ ID NO: 1072925 - DNA, 33 bp, Homo sapien
ttagtaagtatttctacctaagatcatgagagt

SEQ ID NO: 1072926 - DNA, 33 bp, Homo sapien
ttagtaagtatttctatctaagatcatgagagt

SEQ ID NO: 1072927 - DNA, 33 bp, Homo sapien
agttataactttgagaacaaccagttttacaaa

SEQ ID NO: 1072928 - DNA, 33 bp, Homo sapien
agttataactttgagagcaaccagttttacaaa

SEQ ID NO: 1072929 - DNA, 33 bp, Homo sapien
ttttcattattattgacgctaagagattttttt

SEQ ID NO: 1072930 - DNA, 33 bp, Homo sapien
ttttcattattattgatgctaagagattttttt

SEQ ID NO: 1072931 - DNA, 33 bp, Homo sapien
ccttttgttgacttacgcgatcctcgggaaaat

SEQ ID NO: 1072932 - DNA, 33 bp, Homo sapien
ccttttgttgacttactcgatcctcgggaaaat

SEQ ID NO: 1072933 - DNA, 33 bp, Homo sapien
aatgaaaaccaccaaccctgtcatatatgtgtt

SEQ ID NO: 1072934 - DNA, 33 bp, Homo sapien
aatgaaaaccaccaactctgtcatatatgtgtt

SEQ ID NO: 1072935 - DNA, 33 bp, Homo sapien
tcactattgtcctaacaaaaacatattatattg

SEQ ID NO: 1072936 - DNA, 33 bp, Homo sapien
tcactattgtcctaacgaaaacatattatattg

SEQ ID NO: 1072937 - DNA, 33 bp, Homo sapien
aagatttatatggttaggaacagatatatcaat

SEQ ID NO: 1072938 - DNA, 33 bp, Homo sapien
aagatttatatggttatgaacagatatatcaat

SEQ ID NO: 1072939 - DNA, 33 bp, Homo sapien
cgagggatgtgagaaactgatgttaaaatacat

SEQ ID NO: 1072940 - DNA, 33 bp, Homo sapien
cgagggatgtgagaaagtgatgttaaaatacat

SEQ ID NO: 1072941 - DNA, 33 bp, Homo sapien
agaatggggattaggaccaaacagtcaatggga

SEQ ID NO: 1072942 - DNA, 33 bp, Homo sapien
agaatggggattaggatcaaacagtcaatggga

SEQ ID NO: 1072943 - DNA, 33 bp, Homo sapien
taaggcaacctatgatcactggagattgcttcc

SEQ ID NO: 1072944 - DNA, 33 bp, Homo sapien
taaggcaacctatgattactggagattgcttcc

SEQ ID NO: 1072945 - DNA, 33 bp, Homo sapien
gagggagtatttaaacaagtcctagccagaggg

SEQ ID NO: 1072946 - DNA, 33 bp, Homo sapien
gagggagtatttaaacgagtcctagccagaggg

SEQ ID NO: 1072947 - DNA, 33 bp, Homo sapien
tttgacctcaaacaagacagattaggagtctcc

SEQ ID NO: 1072948 - DNA, 33 bp, Homo sapien
tttgacctcaaacaagtcagattaggagtctcc

SEQ ID NO: 1072949 - DNA, 33 bp, Homo sapien
cacattacctgacttcaaaccacactacagagc

SEQ ID NO: 1072950 - DNA, 33 bp, Homo sapien
cacattacctgacttccaaccacactacagagc

SEQ ID NO: 1072951 - DNA, 33 bp, Homo sapien; identical to SEQ ID NO: 1072949

SEQ ID NO: 1072952 - DNA, 33 bp, Homo sapien; identical to SEQ ID NO: 1072950

SEQ ID NO: 1072953 - DNA, 33 bp, Homo sapien
atttctatatgccaacagtgagcaatgtgaaag

SEQ ID NO: 1072954 - DNA, 33 bp, Homo sapien
atttctatatgccaacggtgagcaatgtgaaag

SEQ ID NO: 1072955 - DNA, 33 bp, Homo sapien
gtgttggtatggtaaacggtgtcttgtgcttgt

SEQ ID NO: 1072956 - DNA, 33 bp, Homo sapien
gtgttggtatggtaaatggtgtcttgtgcttgt

SEQ ID NO: 1072957 - DNA, 33 bp, Homo sapien
agtatatgaaacaaaaatgaatcaccacatcct

SEQ ID NO: 1072958 - DNA, 33 bp, Homo sapien
agtatatgaaacaaaattgaatcaccacatcct

SEQ ID NO: 1072959 - DNA, 33 bp, Homo sapien
tctattctctgaaaaacaggtatttccattgtt

SEQ ID NO: 1072960 - DNA, 33 bp, Homo sapien
tctattctctgaaaaataggtatttccattgtt

SEQ ID NO: 1072961 - DNA, 33 bp, Homo sapien
ttccctgataacaggagaacctagctggccatg

SEQ ID NO: 1072962 - DNA, 33 bp, Homo sapien
ttccctgataacaggataacctagctggccatg

SEQ ID NO: 1072963 - DNA, 33 bp, Homo sapien
gaacatagatgttacagtcagggaaattttaca

SEQ ID NO: 1072964 - DNA, 33 bp, Homo sapien
gaacatagatgttacattcagggaaattttaca

SEQ ID NO: 1072965 - DNA, 33 bp, Homo sapien
ttgtccaagtaattcacagagactttgttagaa

SEQ ID NO: 1072966 - DNA, 33 bp, Homo sapien
ttgtccaagtaattcatagagactttgttagaa

SEQ ID NO: 1072967 - DNA, 33 bp, Homo sapien
atgtagtcattaagcaaattgtcctgttagtac

SEQ ID NO: 1072968 - DNA, 33 bp, Homo sapien
atgtagtcattaagcacattgtcctgttagtac

SEQ ID NO: 1072969 - DNA, 33 bp, Homo sapien
caaacttctgcatacacgtgtttctgtatatct

SEQ ID NO: 1072970 - DNA, 33 bp, Homo sapien
caaacttctgcatacaggtgtttctgtatatct

SEQ ID NO: 1072971 - DNA, 33 bp, Homo sapien
gctgcataccccaacaatcaactcaggctgaga

SEQ ID NO: 1072972 - DNA, 33 bp, Homo sapien
gctgcataccccaacagtcaactcaggctgaga

SEQ ID NO: 1072973 - DNA, 33 bp, Homo sapien
tggtctcgggacttccaataatggatgtcttaa

SEQ ID NO: 1072974 - DNA, 33 bp, Homo sapien
tggtctcgggacttccgataatggatgtcttaa

SEQ ID NO: 1072975 - DNA, 33 bp, Homo sapien
ggatgtcttaagagtaggttggaggggagtagg

SEQ ID NO: 1072976 - DNA, 33 bp, Homo sapien
ggatgtcttaagagtatgttggaggggagtagg

SEQ ID NO: 1072977 - DNA, 33 bp, Homo sapien
gggcacacagcttgacaactgtatattctcaat

SEQ ID NO: 1072978 - DNA, 33 bp, Homo sapien
gggcacacagcttgacgactgtatattctcaat

SEQ ID NO: 1072979 - DNA, 33 bp, Homo sapien
tccaaaattatctcaacggcaaaaatgacagag

SEQ ID NO: 1072980 - DNA, 33 bp, Homo sapien
tccaaaattatctcaatggcaaaaatgacagag

SEQ ID NO: 1072981 - DNA, 33 bp, Homo sapien
caaacaccatctgtcacagtgtttactctgcca

SEQ ID NO: 1072982 - DNA, 33 bp, Homo sapien
caaacaccatctgtcatagtgtttactctgcca

SEQ ID NO: 1072983 - DNA, 33 bp, Homo sapien
ggaaatgcagtagagactaacggtcacaaaaat

SEQ ID NO: 1072984 - DNA, 33 bp, Homo sapien
ggaaatgcagtagagagtaacggtcacaaaaat

SEQ ID NO: 1072985 - DNA, 33 bp, Homo sapien
cgttattaagagctgaaaggaaaaagtaggtga

SEQ ID NO: 1072986 - DNA, 33 bp, Homo sapien
cgttattaagagctgagaggaaaaagtaggtga

SEQ ID NO: 1072987 - DNA, 33 bp, Homo sapien
gaaacaatctaaatggaagtttgtaaccaacag

SEQ ID NO: 1072988 - DNA, 33 bp, Homo sapien
gaaacaatctaaatgggagtttgtaaccaacag

SEQ ID NO: 1072989 - DNA, 33 bp, Homo sapien
agaacaggactaaagactcaaatgcccaataaa

SEQ ID NO: 1072990 - DNA, 33 bp, Homo sapien
agaacaggactaaagattcaaatgcccaataaa

SEQ ID NO: 1072991 - DNA, 33 bp, Homo sapien
tactggctcacaaaacgaactggatgcaaacag

SEQ ID NO: 1072992 - DNA, 33 bp, Homo sapien
tactggctcacaaaactaactggatgcaaacag

SEQ ID NO: 1072993 - DNA, 33 bp, Homo sapien
cagaagttgcacctaccgggtgttagttaagtc

SEQ ID NO: 1072994 - DNA, 33 bp, Homo sapien
cagaagttgcacctactgggtgttagttaagtc

SEQ ID NO: 1072995 - DNA, 33 bp, Homo sapien
gtgaccttacacttgacactaaaggtgttggct

SEQ ID NO: 1072996 - DNA, 33 bp, Homo sapien
gtgaccttacacttgatactaaaggtgttggct

SEQ ID NO: 1072997 - DNA, 33 bp, Homo sapien
atccctctgattccccaacacaatttccctgat

SEQ ID NO: 1072998 - DNA, 33 bp, Homo sapien
atccctctgattcccctacacaatttccctgat

SEQ ID NO: 1072999 - DNA, 33 bp, Homo sapien
aactgctctaccaaccagcatttgtcccttctc

SEQ ID NO: 1073000 - DNA, 33 bp, Homo sapien
aactgctctaccaaccggcatttgtcccttctc

SEQ ID NO: 1073001 - DNA, 33 bp, Homo sapien
atatgtcaagatattcaatttttcacagtttag

SEQ ID NO: 1073002 - DNA, 33 bp, Homo sapien
atatgtcaagatattcgatttttcacagtttag

SEQ ID NO: 1073003 - DNA, 33 bp, Homo sapien
aaagtctgaatttataaagctctgaaacagagg

SEQ ID NO: 1073004 - DNA, 33 bp, Homo sapien
aaagtctgaatttatagagctctgaaacagagg

SEQ ID NO: 1073005 - DNA, 33 bp, Homo sapien
gaataccacactctcacggttctcctgagctta

SEQ ID NO: 1073006 - DNA, 33 bp, Homo sapien
gaataccacactctcatggttctcctgagctta

SEQ ID NO: 1073007 - DNA, 33 bp, Homo sapien
acctgatagacatggagcatattttggtatgct

SEQ ID NO: 1073008 - DNA, 33 bp, Homo sapien
acctgatagacatggatcatattttggtatgct

SEQ ID NO: 1073009 - DNA, 33 bp, Homo sapien
cagtttctatgatcaactcgagggagaaaatgg

SEQ ID NO: 1073010 - DNA, 33 bp, Homo sapien
cagtttctatgatcaattcgagggagaaaatgg

SEQ ID NO: 1073011 - DNA, 33 bp, Homo sapien
actcaggcactttccaaacctatggactaggca

SEQ ID NO: 1073012 - DNA, 33 bp, Homo sapien
actcaggcactttccagacctatggactaggca

SEQ ID NO: 1073013 - DNA, 33 bp, Homo sapien
gaggtaaatcgatgaacatacagtcggcactga

SEQ ID NO: 1073014 - DNA, 33 bp, Homo sapien
gaggtaaatcgatgaagatacagtcggcactga

SEQ ID NO: 1073015 - DNA, 33 bp, Homo sapien
tacttctccctcaacaagtatatatgcagtttc

SEQ ID NO: 1073016 - DNA, 33 bp, Homo sapien
tacttctccctcaacacgtatatatgcagtttc

SEQ ID NO: 1073017 - DNA, 33 bp, Homo sapien
agggctagtgaaactgcattgtgcaaagttgca

SEQ ID NO: 1073018 - DNA, 33 bp, Homo sapien
agggctagtgaaactgtattgtgcaaagttgca

SEQ ID NO: 1073019 - DNA, 33 bp, Homo sapien
atctgagttgatcgagacccttaaagaaatctg

SEQ ID NO: 1073020 - DNA, 33 bp, Homo sapien
atctgagttgatcgaggcccttaaagaaatctg

SEQ ID NO: 1073021 - DNA, 33 bp, Homo sapien
ttcctaattccaaaacaaagagggctttatggg

SEQ ID NO: 1073022 - DNA, 33 bp, Homo sapien
ttcctaattccaaaacgaagagggctttatggg

SEQ ID NO: 1073023 - DNA, 33 bp, Homo sapien
ctttataaaatgtaacactcacagattagtctt

SEQ ID NO: 1073024 - DNA, 33 bp, Homo sapien
ctttataaaatgtaacgctcacagattagtctt

SEQ ID NO: 1073025 - DNA, 33 bp, Homo sapien
acaatgttgtaactcaagtaaaatgcctttaag

SEQ ID NO: 1073026 - DNA, 33 bp, Homo sapien
acaatgttgtaactcaggtaaaatgcctttaag

SEQ ID NO: 1073027 - DNA, 33 bp, Homo sapien
atggatggagcttttaaagtttcttaacagact

SEQ ID NO: 1073028 - DNA, 33 bp, Homo sapien
atggatggagcttttagagtttcttaacagact

SEQ ID NO: 1073029 - DNA, 33 bp, Homo sapien
gttcaccacttttgtgcatcctattatgcctaa

SEQ ID NO: 1073030 - DNA, 33 bp, Homo sapien
gttcaccacttttgtgtatcctattatgcctaa

SEQ ID NO: 1073031 - DNA, 33 bp, Homo sapien
atgctcttggtgataactatgtagtttggctag

SEQ ID NO: 1073032 - DNA, 33 bp, Homo sapien
atgctcttggtgataagtatgtagtttggctag

SEQ ID NO: 1073033 - DNA, 33 bp, Homo sapien
aatacccctcgtctacaccaggtacttatgatc

SEQ ID NO: 1073034 - DNA, 33 bp, Homo sapien
aatacccctcgtctactccaggtacttatgatc

SEQ ID NO: 1073035 - DNA, 33 bp, Homo sapien
ggatccacagaggaagccagataaattagccta

SEQ ID NO: 1073036 - DNA, 33 bp, Homo sapien
ggatccacagaggaaggcagataaattagccta

SEQ ID NO: 1073037 - DNA, 33 bp, Homo sapien
cactatacacacaagacatataaatattagatg

SEQ ID NO: 1073038 - DNA, 33 bp, Homo sapien
cactatacacacaagagatataaatattagatg

SEQ ID NO: 1073039 - DNA, 33 bp, Homo sapien
aacagtcagcttttaacacttaagcagaacacg

SEQ ID NO: 1073040 - DNA, 33 bp, Homo sapien
aacagtcagcttttaatacttaagcagaacacg

SEQ ID NO: 1073041 - DNA, 33 bp, Homo sapien
ccttgggaattaagcgaacatcagcggtagcca

SEQ ID NO: 1073042 - DNA, 33 bp, Homo sapien
ccttgggaattaagcggacatcagcggtagcca

SEQ ID NO: 1073043 - DNA, 33 bp, Homo sapien
caatctctttgttgaaagcatctgatagaattc

SEQ ID NO: 1073044 - DNA, 33 bp, Homo sapien
caatctctttgttgaatgcatctgatagaattc

SEQ ID NO: 1073045 - DNA, 33 bp, Homo sapien
cgtcaaatcaatacaaatcaaaaacactggtgt

SEQ ID NO: 1073046 - DNA, 33 bp, Homo sapien
cgtcaaatcaatacaagtcaaaaacactggtgt

SEQ ID NO: 1073047 - DNA, 33 bp, Homo sapien
tatgaaggaggtataaaaagcccaatggcagga

SEQ ID NO: 1073048 - DNA, 33 bp, Homo sapien
tatgaaggaggtataagaagcccaatggcagga

SEQ ID NO: 1073049 - DNA, 33 bp, Homo sapien
acacttttaaaaccataatcttttgtgagaact

SEQ ID NO: 1073050 - DNA, 33 bp, Homo sapien
acacttttaaaaccattatcttttgtgagaact

SEQ ID NO: 1073051 - DNA, 33 bp, Homo sapien
gctgagttttaatccacctattcattgagctac

SEQ ID NO: 1073052 - DNA, 33 bp, Homo sapien
gctgagttttaatccatctattcattgagctac

SEQ ID NO: 1073053 - DNA, 33 bp, Homo sapien
gaagatgagaagtttccaaagagtcagtagcaa

SEQ ID NO: 1073054 - DNA, 33 bp, Homo sapien
gaagatgagaagtttctaaagagtcagtagcaa

SEQ ID NO: 1073055 - DNA, 33 bp, Homo sapien
ctgcagctagaaaaacaattgaggcctggtttg

SEQ ID NO: 1073056 - DNA, 33 bp, Homo sapien
ctgcagctagaaaaacgattgaggcctggtttg

SEQ ID NO: 1073057 - DNA, 33 bp, Homo sapien
tgactcttaacctctcaagttacagtagttaat

SEQ ID NO: 1073058 - DNA, 33 bp, Homo sapien
tgactcttaacctctcgagttacagtagttaat

SEQ ID NO: 1073059 - DNA, 33 bp, Homo sapien
tttccttgagttaaaccgttgctcttaggacaa

SEQ ID NO: 1073060 - DNA, 33 bp, Homo sapien
tttccttgagttaaactgttgctcttaggacaa

SEQ ID NO: 1073061 - DNA, 33 bp, Homo sapien
agtgtaatagttgttacggctttgggacttacc

SEQ ID NO: 1073062 - DNA, 33 bp, Homo sapien
agtgtaatagttgttatggctttgggacttacc

SEQ ID NO: 1073063 - DNA, 33 bp, Homo sapien
ctaagtcaatacttaacagccatttcacgaaag

SEQ ID NO: 1073064 - DNA, 33 bp, Homo sapien
ctaagtcaatacttaagagccatttcacgaaag

SEQ ID NO: 1073065 - DNA, 33 bp, Homo sapien
gtttcagttatagttgcaagagcataggaatgt

SEQ ID NO: 1073066 - DNA, 33 bp, Homo sapien
gtttcagttatagttgtaagagcataggaatgt

SEQ ID NO: 1073067 - DNA, 33 bp, Homo sapien
tattcacattgagtgaaaaaccacttgcatgac

SEQ ID NO: 1073068 - DNA, 33 bp, Homo sapien
tattcacattgagtgacaaaccacttgcatgac

SEQ ID NO: 1073069 - DNA, 33 bp, Homo sapien
aatttgccaagttgaacaaaacgtcccatggaa

SEQ ID NO: 1073070 - DNA, 33 bp, Homo sapien
aatttgccaagttgaataaaacgtcccatggaa

SEQ ID NO: 1073071 - DNA, 33 bp, Homo sapien
taattttcctataatcacatagcagttaagctg

SEQ ID NO: 1073072 - DNA, 33 bp, Homo sapien
taattttcctataatcgcatagcagttaagctg

SEQ ID NO: 1073073 - DNA, 33 bp, Homo sapien
gatgtctaatttgccactaaatttttttcagat

SEQ ID NO: 1073074 - DNA, 33 bp, Homo sapien
gatgtctaatttgccagtaaatttttttcagat

SEQ ID NO: 1073075 - DNA, 33 bp, Homo sapien
catagacaacagaatgaagatatgtacgatagg

SEQ ID NO: 1073076 - DNA, 33 bp, Homo sapien
catagacaacagaatggagatatgtacgatagg

SEQ ID NO: 1073077 - DNA, 33 bp, Homo sapien
caattatccttttacacgttctttacttactga

SEQ ID NO: 1073078 - DNA, 33 bp, Homo sapien
caattatccttttacatgttctttacttactga

SEQ ID NO: 1073079 - DNA, 33 bp, Homo sapien
tgcctttatactttcacggcagtactgtctatt

SEQ ID NO: 1073080 - DNA, 33 bp, Homo sapien
tgcctttatactttcatggcagtactgtctatt

SEQ ID NO: 1073081 - DNA, 33 bp, Homo sapien
agctacggttgtaaaacaaaacattgctaatat

SEQ ID NO: 1073082 - DNA, 33 bp, Homo sapien
agctacggttgtaaaagaaaacattgctaatat

SEQ ID NO: 1073083 - DNA, 33 bp, Homo sapien
ttcttactcatcttaacctcttcatataaaaaa

SEQ ID NO: 1073084 - DNA, 33 bp, Homo sapien
ttcttactcatcttaatctcttcatataaaaaa

SEQ ID NO: 1073085 - DNA, 33 bp, Homo sapien
taaaatatatgtaaaacgttgaagttaattgaa

SEQ ID NO: 1073086 - DNA, 33 bp, Homo sapien
taaaatatatgtaaaatgttgaagttaattgaa

SEQ ID NO: 1073087 - DNA, 33 bp, Homo sapien
cagagtacaatggtaaataatgggagaggaaga

SEQ ID NO: 1073088 - DNA, 33 bp, Homo sapien
cagagtacaatggtaagtaatgggagaggaaga

SEQ ID NO: 1073089 - DNA, 33 bp, Homo sapien
ttcaccctggctctcacatggctggcatcttca

SEQ ID NO: 1073090 - DNA, 33 bp, Homo sapien
ttcaccctggctctcatatggctggcatcttca

SEQ ID NO: 1073091 - DNA, 33 bp, Homo sapien
ccttttgaaaaaccaacgcttattaagtacttg

SEQ ID NO: 1073092 - DNA, 33 bp, Homo sapien
ccttttgaaaaaccaatgcttattaagtacttg

SEQ ID NO: 1073093 - DNA, 33 bp, Homo sapien
aatagcatcaagtaccaaaaactgtgaacattg

SEQ ID NO: 1073094 - DNA, 33 bp, Homo sapien
aatagcatcaagtacccaaaactgtgaacattg

SEQ ID NO: 1073095 - DNA, 33 bp, Homo sapien
gaaatgtcatccaggagtcagggccttaaaagc

SEQ ID NO: 1073096 - DNA, 33 bp, Homo sapien
gaaatgtcatccaggattcagggccttaaaagc

SEQ ID NO: 1073097 - DNA, 33 bp, Homo sapien
cataaaagttcggaaaatgtgcggcttgacaat

SEQ ID NO: 1073098 - DNA, 33 bp, Homo sapien
cataaaagttcggaaagtgtgcggcttgacaat

SEQ ID NO: 1073099 - DNA, 33 bp, Homo sapien; identical to SEQ ID NO: 1073097

SEQ ID NO: 1073100 - DNA, 33 bp, Homo sapien; identical to SEQ ID NO: 1073098

SEQ ID NO: 1073101 - DNA, 33 bp, Homo sapien; identical to SEQ ID NO: 1073097

SEQ ID NO: 1073102 - DNA, 33 bp, Homo sapien; identical to SEQ ID NO: 1073098

SEQ ID NO: 1073103 - DNA, 33 bp, Homo sapien
atggacatctagtcacaggattgtaaagtgact

SEQ ID NO: 1073104 - DNA, 33 bp, Homo sapien
atggacatctagtcaccggattgtaaagtgact

SEQ ID NO: 1073105 - DNA, 33 bp, Homo sapien
attagaggtgggttgtcaatataggaaatctgg

SEQ ID NO: 1073106 - DNA, 33 bp, Homo sapien
attagaggtgggttgtgaatataggaaatctgg

SEQ ID NO: 1073107 - DNA, 33 bp, Homo sapien
tcttggaagtagcagacgtaattattattaatc

SEQ ID NO: 1073108 - DNA, 33 bp, Homo sapien
tcttggaagtagcagatgtaattattattaatc

SEQ ID NO: 1073109 - DNA, 33 bp, Homo sapien
ggggtttgaaaccactcagtgggagagtttctt

SEQ ID NO: 1073110 - DNA, 33 bp, Homo sapien
ggggtttgaaaccacttagtgggagagtttctt

SEQ ID NO: 1073111 - DNA, 33 bp, Homo sapien
taaaccttgactgatacagaattctaggtgaaa

SEQ ID NO: 1073112 - DNA, 33 bp, Homo sapien
taaaccttgactgatagagaattctaggtgaaa

SEQ ID NO: 1073113 - DNA, 33 bp, Homo sapien
gctctaggcatccatgaagtgttatgactgtgt

SEQ ID NO: 1073114 - DNA, 33 bp, Homo sapien
gctctaggcatccatgcagtgttatgactgtgt

SEQ ID NO: 1073115 - DNA, 33 bp, Homo sapien
aaatgacacaaataaaggctgactgctcatgta

SEQ ID NO: 1073116 - DNA, 33 bp, Homo sapien
aaatgacacaaataaatgctgactgctcatgta

SEQ ID NO: 1073117 - DNA, 33 bp, Homo sapien
tcaacaaaacacgcaactacatatgtgccctgt

SEQ ID NO: 1073118 - DNA, 33 bp, Homo sapien
tcaacaaaacacgcaattacatatgtgccctgt

SEQ ID NO: 1073119 - DNA, 33 bp, Homo sapien
caggtaaaccaatcacaaagttgtgaacatctg

SEQ ID NO: 1073120 - DNA, 33 bp, Homo sapien
caggtaaaccaatcacgaagttgtgaacatctg

SEQ ID NO: 1073121 - DNA, 33 bp, Homo sapien
agcaagtccatcttcaaatctgtattaggcttc

SEQ ID NO: 1073122 - DNA, 33 bp, Homo sapien
agcaagtccatcttcatatctgtattaggcttc

SEQ ID NO: 1073123 - DNA, 33 bp, Homo sapien
gtgatgcatggaacaacttgcagtaaatacttt

SEQ ID NO: 1073124 - DNA, 33 bp, Homo sapien
gtgatgcatggaacaatttgcagtaaatacttt

SEQ ID NO: 1073125 - DNA, 33 bp, Homo sapien
tccctacacatgaaccgcagtctggcatctctc

SEQ ID NO: 1073126 - DNA, 33 bp, Homo sapien
tccctacacatgaacctcagtctggcatctctc

SEQ ID NO: 1073127 - DNA, 33 bp, Homo sapien
agaggacttatgtgtccagataatgttgctcag

SEQ ID NO: 1073128 - DNA, 33 bp, Homo sapien
agaggacttatgtgtctagataatgttgctcag

SEQ ID NO: 1073129 - DNA, 33 bp, Homo sapien
gtcagtgcttttaggccatctgtcaccttaata

SEQ ID NO: 1073130 - DNA, 33 bp, Homo sapien
gtcagtgcttttaggctatctgtcaccttaata

SEQ ID NO: 1073131 - DNA, 33 bp, Homo sapien
cattggttttaggacaacaatttatgactaaga

SEQ ID NO: 1073132 - DNA, 33 bp, Homo sapien
cattggttttaggacagcaatttatgactaaga

SEQ ID NO: 1073133 - DNA, 33 bp, Homo sapien
attcatatggaaccagaaaagagcatgaatagc

SEQ ID NO: 1073134 - DNA, 33 bp, Homo sapien
attcatatggaaccagcaaagagcatgaatagc

SEQ ID NO: 1073135 - DNA, 33 bp, Homo sapien
cagggccacaagaacacacaagtctacaactct

SEQ ID NO: 1073136 - DNA, 33 bp, Homo sapien
cagggccacaagaacatacaagtctacaactct

SEQ ID NO: 1073137 - DNA, 33 bp, Homo sapien
aaaacttctgtgccaccgtacctgagatggata

SEQ ID NO: 1073138 - DNA, 33 bp, Homo sapien
aaaacttctgtgccactgtacctgagatggata

SEQ ID NO: 1073139 - DNA, 33 bp, Homo sapien
tggagttaattcttccactctacaaatggggaa

SEQ ID NO: 1073140 - DNA, 33 bp, Homo sapien
tggagttaattcttccgctctacaaatggggaa

SEQ ID NO: 1073141 - DNA, 33 bp, Homo sapien
taaatgtctccctctactaagctagccactgaa

SEQ ID NO: 1073142 - DNA, 33 bp, Homo sapien
taaatgtctccctctattaagctagccactgaa

SEQ ID NO: 1073143 - DNA, 33 bp, Homo sapien
gcaaacaaagaagaagacccttagcagacacca

SEQ ID NO: 1073144 - DNA, 33 bp, Homo sapien
gcaaacaaagaagaaggcccttagcagacacca

SEQ ID NO: 1073145 - DNA, 33 bp, Homo sapien
cccaagtaacaaaggccagaagccagaatgata

SEQ ID NO: 1073146 - DNA, 33 bp, Homo sapien
cccaagtaacaaaggcgagaagccagaatgata

SEQ ID NO: 1073147 - DNA, 33 bp, Homo sapien
ttgatctgtgtttcgaggtctctcattattttc

SEQ ID NO: 1073148 - DNA, 33 bp, Homo sapien
ttgatctgtgtttcgatgtctctcattattttc

SEQ ID NO: 1073149 - DNA, 33 bp, Homo sapien
gtacagttaagtgataagacaaataggtaacat

SEQ ID NO: 1073150 - DNA, 33 bp, Homo sapien
gtacagttaagtgatatgacaaataggtaacat

SEQ ID NO: 1073151 - DNA, 33 bp, Homo sapien
ttaagatgattgtccacataggttccggttcag

SEQ ID NO: 1073152 - DNA, 33 bp, Homo sapien
ttaagatgattgtccagataggttccggttcag

SEQ ID NO: 1073153 - DNA, 33 bp, Homo sapien
ttctgtcccagagataagtctaatgctgaaagt

SEQ ID NO: 1073154 - DNA, 33 bp, Homo sapien
ttctgtcccagagatatgtctaatgctgaaagt

SEQ ID NO: 1073155 - DNA, 33 bp, Homo sapien
agagaagtcctgttcaaccttcaaacaatttcc

SEQ ID NO: 1073156 - DNA, 33 bp, Homo sapien
agagaagtcctgttcagccttcaaacaatttcc

SEQ ID NO: 1073157 - DNA, 33 bp, Homo sapien
caaaatctctatttcccataggatcagtgtttc

SEQ ID NO: 1073158 - DNA, 33 bp, Homo sapien
caaaatctctatttccgataggatcagtgtttc

SEQ ID NO: 1073159 - DNA, 33 bp, Homo sapien
aaaaaaagattatgccaaaagatgtgaagaaag

SEQ ID NO: 1073160 - DNA, 33 bp, Homo sapien
aaaaaaagattatgccgaaagatgtgaagaaag

SEQ ID NO: 1073161 - DNA, 33 bp, Homo sapien
ctgatttaaaacctatcacaaagccttatgtac

SEQ ID NO: 1073162 - DNA, 33 bp, Homo sapien
ctgatttaaaacctattacaaagccttatgtac

SEQ ID NO: 1073163 - DNA, 33 bp, Homo sapien
atgtttgtagggtcccaactgcattctttgcat

SEQ ID NO: 1073164 - DNA, 33 bp, Homo sapien
atgtttgtagggtcccgactgcattctttgcat

SEQ ID NO: 1073165 - DNA, 33 bp, Homo sapien
taaatcaaagacattaacttgaacttgatttat

SEQ ID NO: 1073166 - DNA, 33 bp, Homo sapien
taaatcaaagacattaccttgaacttgatttat

SEQ ID NO: 1073167 - DNA, 33 bp, Homo sapien
caatttgagaaaataaatctgagtatgtggaag

SEQ ID NO: 1073168 - DNA, 33 bp, Homo sapien
caatttgagaaaataagtctgagtatgtggaag

SEQ ID NO: 1073169 - DNA, 33 bp, Homo sapien
atatcccattagtcaacgagtcttccacagcaa

SEQ ID NO: 1073170 - DNA, 33 bp, Homo sapien
atatcccattagtcaatgagtcttccacagcaa

SEQ ID NO: 1073171 - DNA, 33 bp, Homo sapien
ctctgttatgggaataaggcatattaattattc

SEQ ID NO: 1073172 - DNA, 33 bp, Homo sapien
ctctgttatgggaatatggcatattaattattc

SEQ ID NO: 1073173 - DNA, 33 bp, Homo sapien
tctcacactggtcagaatagctattactaagaa

SEQ ID NO: 1073174 - DNA, 33 bp, Homo sapien
tctcacactggtcagagtagctattactaagaa

SEQ ID NO: 1073175 - DNA, 33 bp, Homo sapien
gccgtttgttctacacactatctttttatcttg

SEQ ID NO: 1073176 - DNA, 33 bp, Homo sapien
gccgtttgttctacaccctatctttttatcttg

SEQ ID NO: 1073177 - DNA, 33 bp, Homo sapien
agcagataattttccaagcctagtggattgcat

SEQ ID NO: 1073178 - DNA, 33 bp, Homo sapien
agcagataattttccaggcctagtggattgcat

SEQ ID NO: 1073179 - DNA, 33 bp, Homo sapien
cagaatctgtgtgcaacatccagtggtagagaa

SEQ ID NO: 1073180 - DNA, 33 bp, Homo sapien
cagaatctgtgtgcaatatccagtggtagagaa

SEQ ID NO: 1073181 - DNA, 33 bp, Homo sapien
ctttgtaatttttctcactgttggatttttcac

SEQ ID NO: 1073182 - DNA, 33 bp, Homo sapien
ctttgtaatttttctctctgttggatttttcac

SEQ ID NO: 1073183 - DNA, 33 bp, Homo sapien
ctctcagctaatggcactgattggaagaggagg

SEQ ID NO: 1073184 - DNA, 33 bp, Homo sapien
ctctcagctaatggcattgattggaagaggagg

SEQ ID NO: 1073185 - DNA, 33 bp, Homo sapien
tctaaacctctgtcaacctggcagggaaatata

SEQ ID NO: 1073186 - DNA, 33 bp, Homo sapien
tctaaacctctgtcaatctggcagggaaatata

SEQ ID NO: 1073187 - DNA, 33 bp, Homo sapien
caacccattttgttaaagttggacagcataccc

SEQ ID NO: 1073188 - DNA, 33 bp, Homo sapien
caacccattttgttaacgttggacagcataccc

SEQ ID NO: 1073189 - DNA, 33 bp, Homo sapien
atctcctacataaatcaacagaactttaaatat

SEQ ID NO: 1073190 - DNA, 33 bp, Homo sapien
atctcctacataaatcgacagaactttaaatat

SEQ ID NO: 1073191 - DNA, 33 bp, Homo sapien
acataatcatagttcaaatcttatggcaattga

SEQ ID NO: 1073192 - DNA, 33 bp, Homo sapien
acataatcatagttcatatcttatggcaattga

SEQ ID NO: 1073193 - DNA, 33 bp, Homo sapien
ttttgagcaccttacaaatgctagctttccatt

SEQ ID NO: 1073194 - DNA, 33 bp, Homo sapien
ttttgagcaccttacagatgctagctttccatt

SEQ ID NO: 1073195 - DNA, 33 bp, Homo sapien
aagacattccagtaaactcaatgagagtgctaa

SEQ ID NO: 1073196 - DNA, 33 bp, Homo sapien
aagacattccagtaaattcaatgagagtgctaa

SEQ ID NO: 1073197 - DNA, 33 bp, Homo sapien
ttagcttcggcctatgccaggttagggtcatct

SEQ ID NO: 1073198 - DNA, 33 bp, Homo sapien
ttagcttcggcctatggcaggttagggtcatct

SEQ ID NO: 1073199 - DNA, 33 bp, Homo sapien
gtagtagaacataaggacatagttgtgtggatt

SEQ ID NO: 1073200 - DNA, 33 bp, Homo sapien
gtagtagaacataagggcatagttgtgtggatt

SEQ ID NO: 1073201 - DNA, 33 bp, Homo sapien
cttcattaaactaataagattttgaggactatt

SEQ ID NO: 1073202 - DNA, 33 bp, Homo sapien
cttcattaaactaataggattttgaggactatt

SEQ ID NO: 1073203 - DNA, 33 bp, Homo sapien
tttgtaatgcagaatacgccgtaagaaataaaa

SEQ ID NO: 1073204 - DNA, 33 bp, Homo sapien
tttgtaatgcagaatatgccgtaagaaataaaa

SEQ ID NO: 1073205 - DNA, 33 bp, Homo sapien
tggttaaattttttcaaatcatgacaggtctgc

SEQ ID NO: 1073206 - DNA, 33 bp, Homo sapien
tggttaaattttttcagatcatgacaggtctgc

SEQ ID NO: 1073207 - DNA, 33 bp, Homo sapien
tcttctttgctctttacggcttagatgcaaatt

SEQ ID NO: 1073208 - DNA, 33 bp, Homo sapien
tcttctttgctctttatggcttagatgcaaatt

SEQ ID NO: 1073209 - DNA, 33 bp, Homo sapien
ccaggtagaacctgaggaataatcaaagataaa

SEQ ID NO: 1073210 - DNA, 33 bp, Homo sapien
ccaggtagaacctgagtaataatcaaagataaa

SEQ ID NO: 1073211 - DNA, 33 bp, Homo sapien
ataggagcatatgtcactcattaaactgcaatt

SEQ ID NO: 1073212 - DNA, 33 bp, Homo sapien
ataggagcatatgtcattcattaaactgcaatt

SEQ ID NO: 1073213 - DNA, 33 bp, Homo sapien
gcctccccagaaactaagaggatgttggtacca

SEQ ID NO: 1073214 - DNA, 33 bp, Homo sapien
gcctccccagaaactaggaggatgttggtacca

SEQ ID NO: 1073215 - DNA, 33 bp, Homo sapien
atttatttacctgaatcatcgatctcttttaaa

SEQ ID NO: 1073216 - DNA, 33 bp, Homo sapien
atttatttacctgaattatcgatctcttttaaa

SEQ ID NO: 1073217 - DNA, 33 bp, Homo sapien
ccatccttccttcacacagcagcttgaagacct

SEQ ID NO: 1073218 - DNA, 33 bp, Homo sapien
ccatccttccttcacatagcagcttgaagacct

SEQ ID NO: 1073219 - DNA, 33 bp, Homo sapien
gagatttgtagactagacactgaaaaaagaggt

SEQ ID NO: 1073220 - DNA, 33 bp, Homo sapien
gagatttgtagactagtcactgaaaaaagaggt

SEQ ID NO: 1073221 - DNA, 33 bp, Homo sapien
aagaaaccctggactacgtggtgttgtgaaaga

SEQ ID NO: 1073222 - DNA, 33 bp, Homo sapien
aagaaaccctggactatgtggtgttgtgaaaga

SEQ ID NO: 1073223 - DNA, 33 bp, Homo sapien
attacataaaaattcacgtataagtgtacccac

SEQ ID NO: 1073224 - DNA, 33 bp, Homo sapien
attacataaaaattcatgtataagtgtacccac

SEQ ID NO: 1073225 - DNA, 33 bp, Homo sapien
ttctccacccttctcactctccagttgtcacca

SEQ ID NO: 1073226 - DNA, 33 bp, Homo sapien
ttctccacccttctcattctccagttgtcacca

SEQ ID NO: 1073227 - DNA, 33 bp, Homo sapien
tcacttcatctgaaaactccactaggatccaca

SEQ ID NO: 1073228 - DNA, 33 bp, Homo sapien
tcacttcatctgaaaattccactaggatccaca

SEQ ID NO: 1073229 - DNA, 33 bp, Homo sapien
cagcctcactaatacaaaagtggaaattcaaat

SEQ ID NO: 1073230 - DNA, 33 bp, Homo sapien
cagcctcactaatacagaagtggaaattcaaat

SEQ ID NO: 1073231 - DNA, 33 bp, Homo sapien
attctacagttcatcccatgtgtttgatataac

SEQ ID NO: 1073232 - DNA, 33 bp, Homo sapien
attctacagttcatcctatgtgtttgatataac

SEQ ID NO: 1073233 - DNA, 33 bp, Homo sapien
gttcagaaatctcaccaggtgacttttgcttac

SEQ ID NO: 1073234 - DNA, 33 bp, Homo sapien
gttcagaaatctcacccggtgacttttgcttac

SEQ ID NO: 1073235 - DNA, 33 bp, Homo sapien
aggggtctgagtctaccgatacacgggttttgg

SEQ ID NO: 1073236 - DNA, 33 bp, Homo sapien
aggggtctgagtctactgatacacgggttttgg

SEQ ID NO: 1073237 - DNA, 33 bp, Homo sapien
aaccatcctgagataactgatgatgaccttgag

SEQ ID NO: 1073238 - DNA, 33 bp, Homo sapien
aaccatcctgagataattgatgatgaccttgag

SEQ ID NO: 1073239 - DNA, 33 bp, Homo sapien
atttcttttaccacaacctgcaaagtaggaagt

SEQ ID NO: 1073240 - DNA, 33 bp, Homo sapien
atttcttttaccacaatctgcaaagtaggaagt

SEQ ID NO: 1073241 - DNA, 33 bp, Homo sapien
aactgttaaaaacagcaagagaatacaggtaca

SEQ ID NO: 1073242 - DNA, 33 bp, Homo sapien
aactgttaaaaacagccagagaatacaggtaca

SEQ ID NO: 1073243 - DNA, 33 bp, Homo sapien
attaactaccacagcaataaacgatcatactct

SEQ ID NO: 1073244 - DNA, 33 bp, Homo sapien
attaactaccacagcagtaaacgatcatactct

SEQ ID NO: 1073245 - DNA, 33 bp, Homo sapien
attagaacaccaagtacagatcacactcagaaa

SEQ ID NO: 1073246 - DNA, 33 bp, Homo sapien
attagaacaccaagtagagatcacactcagaaa

SEQ ID NO: 1073247 - DNA, 33 bp, Homo sapien
gaaagagtgcaataccaatacatcaagttggta

SEQ ID NO: 1073248 - DNA, 33 bp, Homo sapien
gaaagagtgcaataccgatacatcaagttggta

SEQ ID NO: 1073249 - DNA, 33 bp, Homo sapien
tttaagatgaagtggcaaattaatgcagttaca

SEQ ID NO: 1073250 - DNA, 33 bp, Homo sapien
tttaagatgaagtggcgaattaatgcagttaca

SEQ ID NO: 1073251 - DNA, 33 bp, Homo sapien
gtcatgcctacattaaatacaaaaaagcatctt

SEQ ID NO: 1073252 - DNA, 33 bp, Homo sapien
gtcatgcctacattaagtacaaaaaagcatctt

SEQ ID NO: 1073253 - DNA, 33 bp, Homo sapien
cctgtatacttgaaaccggacgtacttctcctg

SEQ ID NO: 1073254 - DNA, 33 bp, Homo sapien
cctgtatacttgaaactggacgtacttctcctg

SEQ ID NO: 1073255 - DNA, 33 bp, Homo sapien
agcctctactagctccacaacaaaggaagatca

SEQ ID NO: 1073256 - DNA, 33 bp, Homo sapien
agcctctactagctccgcaacaaaggaagatca

SEQ ID NO: 1073257 - DNA, 33 bp, Homo sapien
tgaaggaccggcaacactatcatttgctgccat

SEQ ID NO: 1073258 - DNA, 33 bp, Homo sapien
tgaaggaccggcaacagtatcatttgctgccat

SEQ ID NO: 1073259 - DNA, 33 bp, Homo sapien
gaaaacagcaagatgcaataaaagttaaacttt

SEQ ID NO: 1073260 - DNA, 33 bp, Homo sapien
gaaaacagcaagatgcgataaaagttaaacttt

SEQ ID NO: 1073261 - DNA, 33 bp, Homo sapien
tagtcaaatctgactgcagaaagaccagaagaa

SEQ ID NO: 1073262 - DNA, 33 bp, Homo sapien
tagtcaaatctgactggagaaagaccagaagaa

SEQ ID NO: 1073263 - DNA, 33 bp, Homo sapien; identical to SEQ ID NO: 1073261

SEQ ID NO: 1073264 - DNA, 33 bp, Homo sapien; identical to SEQ ID NO: 1073262

SEQ ID NO: 1073265 - DNA, 33 bp, Homo sapien
taaatttgtcctaagaccttttctcttctctgt

SEQ ID NO: 1073266 - DNA, 33 bp, Homo sapien
taaatttgtcctaagatcttttctcttctctgt

SEQ ID NO: 1073267 - DNA, 33 bp, Homo sapien
ggagaatatcctatcaagtaagccaagaaatga

SEQ ID NO: 1073268 - DNA, 33 bp, Homo sapien
ggagaatatcctatcatgtaagccaagaaatga

SEQ ID NO: 1073269 - DNA, 33 bp, Homo sapien
catagtaaagggccaacaaaatgtagctatata

SEQ ID NO: 1073270 - DNA, 33 bp, Homo sapien
catagtaaagggccaataaaatgtagctatata

SEQ ID NO: 1073271 - DNA, 33 bp, Homo sapien
ttcttcaccaaagagacggcttccttcctttaa

SEQ ID NO: 1073272 - DNA, 33 bp, Homo sapien
ttcttcaccaaagagatggcttccttcctttaa

SEQ ID NO: 1073273 - DNA, 33 bp, Homo sapien
ctttgtgaattgcagaacctctacctattcttt

SEQ ID NO: 1073274 - DNA, 33 bp, Homo sapien
ctttgtgaattgcagatcctctacctattcttt

SEQ ID NO: 1073275 - DNA, 33 bp, Homo sapien
ttcagcactttgcttacacatttctttagctaa

SEQ ID NO: 1073276 - DNA, 33 bp, Homo sapien
ttcagcactttgcttagacatttctttagctaa

SEQ ID NO: 1073277 - DNA, 33 bp, Homo sapien
atgaatatattgcaaccgctatttataccaaca

SEQ ID NO: 1073278 - DNA, 33 bp, Homo sapien
atgaatatattgcaactgctatttataccaaca

SEQ ID NO: 1073279 - DNA, 33 bp, Homo sapien
taccaagtgttggagagaatgtggaacaagtgg

SEQ ID NO: 1073280 - DNA, 33 bp, Homo sapien
taccaagtgttggagataatgtggaacaagtgg

SEQ ID NO: 1073281 - DNA, 33 bp, Homo sapien
gaatagctgttgttaaatcgatcttaagcatag

SEQ ID NO: 1073282 - DNA, 33 bp, Homo sapien
gaatagctgttgttaagtcgatcttaagcatag

SEQ ID NO: 1073283 - DNA, 33 bp, Homo sapien
ttcatgtctgtgttaactcctacttttattgta

SEQ ID NO: 1073284 - DNA, 33 bp, Homo sapien
ttcatgtctgtgttaattcctacttttattgta

SEQ ID NO: 1073285 - DNA, 33 bp, Homo sapien
gctacagtgttttggagatgtcagaaaacaaaa

SEQ ID NO: 1073286 - DNA, 33 bp, Homo sapien
gctacagtgttttggatatgtcagaaaacaaaa

SEQ ID NO: 1073287 - DNA, 33 bp, Homo sapien
tcttatgagttcctcaaaggcaaggatcacatc

SEQ ID NO: 1073288 - DNA, 33 bp, Homo sapien
tcttatgagttcctcagaggcaaggatcacatc

SEQ ID NO: 1073289 - DNA, 33 bp, Homo sapien
acgggtgactaaagacagaaagagagtggggtg

SEQ ID NO: 1073290 - DNA, 33 bp, Homo sapien
acgggtgactaaagaccgaaagagagtggggtg

SEQ ID NO: 1073291 - DNA, 33 bp, Homo sapien
atggctagtaccctgactaaaatattgtatgcc

SEQ ID NO: 1073292 - DNA, 33 bp, Homo sapien
atggctagtaccctgagtaaaatattgtatgcc

SEQ ID NO: 1073293 - DNA, 33 bp, Homo sapien
cataacttagtgttaacgtaccatttttgatcc

SEQ ID NO: 1073294 - DNA, 33 bp, Homo sapien
cataacttagtgttaatgtaccatttttgatcc

SEQ ID NO: 1073295 - DNA, 33 bp, Homo sapien
accttgtacacagtgaactttctaaatttttat

SEQ ID NO: 1073296 - DNA, 33 bp, Homo sapien
accttgtacacagtgacctttctaaatttttat

SEQ ID NO: 1073297 - DNA, 33 bp, Homo sapien
tgttgtagtgcatggcaatatttactttctttt

SEQ ID NO: 1073298 - DNA, 33 bp, Homo sapien
tgttgtagtgcatggccatatttactttctttt

SEQ ID NO: 1073299 - DNA, 33 bp, Homo sapien
tgaaagagctaatcaacggacttaaaggaaaaa

SEQ ID NO: 1073300 - DNA, 33 bp, Homo sapien
tgaaagagctaatcaatggacttaaaggaaaaa

SEQ ID NO: 1073301 - DNA, 33 bp, Homo sapien
atttaggtaggttccacgatgttgctattgtaa

SEQ ID NO: 1073302 - DNA, 33 bp, Homo sapien
atttaggtaggttccatgatgttgctattgtaa

SEQ ID NO: 1073303 - DNA, 33 bp, Homo sapien
tcctcttatctcgaaagaagtccactagcttcc

SEQ ID NO: 1073304 - DNA, 33 bp, Homo sapien
tcctcttatctcgaaataagtccactagcttcc

SEQ ID NO: 1073305 - DNA, 33 bp, Homo sapien
ggaacacagaaagtgaatcacatacctaaaata

SEQ ID NO: 1073306 - DNA, 33 bp, Homo sapien
ggaacacagaaagtgagtcacatacctaaaata

SEQ ID NO: 1073307 - DNA, 33 bp, Homo sapien
agccgacttctacctgaatttccaggcgtttcc

SEQ ID NO: 1073308 - DNA, 33 bp, Homo sapien
agccgacttctacctggatttccaggcgtttcc

SEQ ID NO: 1073309 - DNA, 33 bp, Homo sapien
ctcataaagatacggaatagaaagatgattacc

SEQ ID NO: 1073310 - DNA, 33 bp, Homo sapien
ctcataaagatacggagtagaaagatgattacc

SEQ ID NO: 1073311 - DNA, 33 bp, Homo sapien
gtggtgcagtcatttcacctataatgtgcaagt

SEQ ID NO: 1073312 - DNA, 33 bp, Homo sapien
gtggtgcagtcatttcgcctataatgtgcaagt

SEQ ID NO: 1073313 - DNA, 33 bp, Homo sapien
tgacagccactggatgaaaataatgacagtggg

SEQ ID NO: 1073314 - DNA, 33 bp, Homo sapien
tgacagccactggatggaaataatgacagtggg

SEQ ID NO: 1073315 - DNA, 33 bp, Homo sapien
tgagatttgatgatagaactgataggattttct

SEQ ID NO: 1073316 - DNA, 33 bp, Homo sapien
tgagatttgatgataggactgataggattttct

SEQ ID NO: 1073317 - DNA, 33 bp, Homo sapien
gcatgactgccagatgcattgcacatggtaaaa

SEQ ID NO: 1073318 - DNA, 33 bp, Homo sapien
gcatgactgccagatgtattgcacatggtaaaa

SEQ ID NO: 1073319 - DNA, 33 bp, Homo sapien
tgtttattgttcttccgaaaaaatgggattgct

SEQ ID NO: 1073320 - DNA, 33 bp, Homo sapien
tgtttattgttcttcctaaaaaatgggattgct

SEQ ID NO: 1073321 - DNA, 33 bp, Homo sapien
ctctattcaaggattacacaaaaggtgaaactc

SEQ ID NO: 1073322 - DNA, 33 bp, Homo sapien
ctctattcaaggattatacaaaaggtgaaactc

SEQ ID NO: 1073323 - DNA, 33 bp, Homo sapien
atattacgcaacttcacgtatagtataaaatct

SEQ ID NO: 1073324 - DNA, 33 bp, Homo sapien
atattacgcaacttcatgtatagtataaaatct

SEQ ID NO: 1073325 - DNA, 33 bp, Homo sapien
gaacatcagatatttgaagatgtgggatcttat

SEQ ID NO: 1073326 - DNA, 33 bp, Homo sapien
gaacatcagatatttgtagatgtgggatcttat

SEQ ID NO: 1073327 - DNA, 33 bp, Homo sapien
attcctcttttatatccgaagagcactacagcg

SEQ ID NO: 1073328 - DNA, 33 bp, Homo sapien
attcctcttttatatctgaagagcactacagcg

SEQ ID NO: 1073329 - DNA, 33 bp, Homo sapien
gatgaccatttgttaccagttttctttgtctat

SEQ ID NO: 1073330 - DNA, 33 bp, Homo sapien
gatgaccatttgttacgagttttctttgtctat

SEQ ID NO: 1073331 - DNA, 33 bp, Homo sapien
ttgtaaataccagctaacaccagatgacagtta

SEQ ID NO: 1073332 - DNA, 33 bp, Homo sapien
ttgtaaataccagctaccaccagatgacagtta

SEQ ID NO: 1073333 - DNA, 33 bp, Homo sapien
ttttttaatctattgactatattctgcttattc

SEQ ID NO: 1073334 - DNA, 33 bp, Homo sapien
ttttttaatctattgagtatattctgcttattc

SEQ ID NO: 1073335 - DNA, 33 bp, Homo sapien
attatcgcctgtgtacaaccagtgtctactgct

SEQ ID NO: 1073336 - DNA, 33 bp, Homo sapien
attatcgcctgtgtactaccagtgtctactgct

SEQ ID NO: 1073337 - DNA, 33 bp, Homo sapien
gtcctgtccactcccacgttgcatctttcacat

SEQ ID NO: 1073338 - DNA, 33 bp, Homo sapien
gtcctgtccactcccatgttgcatctttcacat

SEQ ID NO: 1073339 - DNA, 33 bp, Homo sapien; identical to SEQ ID NO: 1073337

SEQ ID NO: 1073340 - DNA, 33 bp, Homo sapien; identical to SEQ ID NO: 1073338

SEQ ID NO: 1073341 - DNA, 33 bp, Homo sapien
ttctatggctgattgaaatttatctaaattaaa

SEQ ID NO: 1073342 - DNA, 33 bp, Homo sapien
ttctatggctgattgacatttatctaaattaaa

SEQ ID NO: 1073343 - DNA, 33 bp, Homo sapien
aatagaataaggcatccaatgagatttttcccg

SEQ ID NO: 1073344 - DNA, 33 bp, Homo sapien
aatagaataaggcatcgaatgagatttttcccg

SEQ ID NO: 1073345 - DNA, 33 bp, Homo sapien
gcttattctgtagtgaagagttgtagtaaggaa

SEQ ID NO: 1073346 - DNA, 33 bp, Homo sapien
gcttattctgtagtgaggagttgtagtaaggaa

SEQ ID NO: 1073347 - DNA, 33 bp, Homo sapien
atgtgttaatcaacaacgtattaaggcacacag

SEQ ID NO: 1073348 - DNA, 33 bp, Homo sapien
atgtgttaatcaacaatgtattaaggcacacag

SEQ ID NO: 1073349 - DNA, 33 bp, Homo sapien
tttccttaaacctttacaccgttctgcaactcg

SEQ ID NO: 1073350 - DNA, 33 bp, Homo sapien
tttccttaaacctttagaccgttctgcaactcg

SEQ ID NO: 1073351 - DNA, 33 bp, Homo sapien
atatgatgacatactcaactaattttgttcctc

SEQ ID NO: 1073352 - DNA, 33 bp, Homo sapien
atatgatgacatactccactaattttgttcctc

SEQ ID NO: 1073353 - DNA, 33 bp, Homo sapien
tagagatatggatgaacggtttaagtagaaaac

SEQ ID NO: 1073354 - DNA, 33 bp, Homo sapien
tagagatatggatgaatggtttaagtagaaaac

SEQ ID NO: 1073355 - DNA, 33 bp, Homo sapien
ttgggtggtgattacactgatgtttataccatt

SEQ ID NO: 1073356 - DNA, 33 bp, Homo sapien
ttgggtggtgattacattgatgtttataccatt

SEQ ID NO: 1073357 - DNA, 33 bp, Homo sapien
accattttattgctgaaaaaactgtattctttg

SEQ ID NO: 1073358 - DNA, 33 bp, Homo sapien
accattttattgctgacaaaactgtattctttg

SEQ ID NO: 1073359 - DNA, 33 bp, Homo sapien
cttaaagtctattcaaataaaaggctgaggtat

SEQ ID NO: 1073360 - DNA, 33 bp, Homo sapien
cttaaagtctattcaattaaaaggctgaggtat

SEQ ID NO: 1073361 - DNA, 33 bp, Homo sapien
attaggtagagaactacgcggatgactaatgac

SEQ ID NO: 1073362 - DNA, 33 bp, Homo sapien
attaggtagagaactatgcggatgactaatgac

SEQ ID NO: 1073363 - DNA, 33 bp, Homo sapien
aaatttgggaaaggtacacgatgcaatgaacat

SEQ ID NO: 1073364 - DNA, 33 bp, Homo sapien
aaatttgggaaaggtatacgatgcaatgaacat

SEQ ID NO: 1073365 - DNA, 33 bp, Homo sapien
ctgttcatataagtagaaaatgctgagatgtca

SEQ ID NO: 1073366 - DNA, 33 bp, Homo sapien
ctgttcatataagtagtaaatgctgagatgtca

SEQ ID NO: 1073367 - DNA, 33 bp, Homo sapien
attggcctccatttgggcattggaaacagtaga

SEQ ID NO: 1073368 - DNA, 33 bp, Homo sapien
attggcctccatttggtcattggaaacagtaga

SEQ ID NO: 1073369 - DNA, 33 bp, Homo sapien
ctcttgaggttgggaacctgttgtgctggaagg

SEQ ID NO: 1073370 - DNA, 33 bp, Homo sapien
ctcttgaggttgggaatctgttgtgctggaagg

SEQ ID NO: 1073371 - DNA, 33 bp, Homo sapien
gtatggattattaaataaaatggactatgtaac

SEQ ID NO: 1073372 - DNA, 33 bp, Homo sapien
gtatggattattaaatcaaatggactatgtaac

SEQ ID NO: 1073373 - DNA, 33 bp, Homo sapien
gttgagtgagagaatgcaagaataagatgtttt

SEQ ID NO: 1073374 - DNA, 33 bp, Homo sapien
gttgagtgagagaatggaagaataagatgtttt

SEQ ID NO: 1073375 - DNA, 33 bp, Homo sapien
tcattgaaagcttgtcaccagctaagagtccct

SEQ ID NO: 1073376 - DNA, 33 bp, Homo sapien
tcattgaaagcttgtcgccagctaagagtccct

SEQ ID NO: 1073377 - DNA, 33 bp, Homo sapien
tctggctcctcatgcaccattttattgagctaa

SEQ ID NO: 1073378 - DNA, 33 bp, Homo sapien
tctggctcctcatgcatcattttattgagctaa

SEQ ID NO: 1073379 - DNA, 33 bp, Homo sapien
atcatacttgaacaaacagatgatttcttgcta

SEQ ID NO: 1073380 - DNA, 33 bp, Homo sapien
atcatacttgaacaaagagatgatttcttgcta

SEQ ID NO: 1073381 - DNA, 33 bp, Homo sapien
ggaactaaacatactacgcatgactacattttg

SEQ ID NO: 1073382 - DNA, 33 bp, Homo sapien
ggaactaaacatactatgcatgactacattttg

SEQ ID NO: 1073383 - DNA, 33 bp, Homo sapien
tcctgagatcaaagtgcatttgtccttaatgaa

SEQ ID NO: 1073384 - DNA, 33 bp, Homo sapien
tcctgagatcaaagtgtatttgtccttaatgaa

SEQ ID NO: 1073385 - DNA, 33 bp, Homo sapien
ggagctgaattgttgccatagtattcaaattag

SEQ ID NO: 1073386 - DNA, 33 bp, Homo sapien
ggagctgaattgttgcgatagtattcaaattag

SEQ ID NO: 1073387 - DNA, 33 bp, Homo sapien
aatacaagatagctgaagtagatcaccttgtat

SEQ ID NO: 1073388 - DNA, 33 bp, Homo sapien
aatacaagatagctgaggtagatcaccttgtat

SEQ ID NO: 1073389 - DNA, 33 bp, Homo sapien
agttgagagaataaacaaacagaatattagtaa

SEQ ID NO: 1073390 - DNA, 33 bp, Homo sapien
agttgagagaataaacgaacagaatattagtaa

SEQ ID NO: 1073391 - DNA, 33 bp, Homo sapien
tttcctctgttgtgagccctaattgttaactca

SEQ ID NO: 1073392 - DNA, 33 bp, Homo sapien
tttcctctgttgtgagtcctaattgttaactca

SEQ ID NO: 1073393 - DNA, 33 bp, Homo sapien
aaattaagcctgttaactggtctaaggatccaa

SEQ ID NO: 1073394 - DNA, 33 bp, Homo sapien
aaattaagcctgttaattggtctaaggatccaa

SEQ ID NO: 1073395 - DNA, 33 bp, Homo sapien
gcagatgaggacattgaagtacagggactaact

SEQ ID NO: 1073396 - DNA, 33 bp, Homo sapien
gcagatgaggacattgtagtacagggactaact

SEQ ID NO: 1073397 - DNA, 33 bp, Homo sapien
taaatataaaaatagcactaagagagtacatag

SEQ ID NO: 1073398 - DNA, 33 bp, Homo sapien
taaatataaaaatagcgctaagagagtacatag

SEQ ID NO: 1073399 - DNA, 33 bp, Homo sapien
tttgctggtgtgcagtcaattgcggcctcccct

SEQ ID NO: 1073400 - DNA, 33 bp, Homo sapien
tttgctggtgtgcagttaattgcggcctcccct

SEQ ID NO: 1073401 - DNA, 33 bp, Homo sapien
gcaacttatatatgcaagtaattttcacattat

SEQ ID NO: 1073402 - DNA, 33 bp, Homo sapien
gcaacttatatatgcaggtaattttcacattat

SEQ ID NO: 1073403 - DNA, 33 bp, Homo sapien
gaggacctcaacaagacagtatttcacctaagt

SEQ ID NO: 1073404 - DNA, 33 bp, Homo sapien
gaggacctcaacaagagagtatttcacctaagt

SEQ ID NO: 1073405 - DNA, 33 bp, Homo sapien
atttttcagatcaacaatggaggaaatgatgga

SEQ ID NO: 1073406 - DNA, 33 bp, Homo sapien
atttttcagatcaacagtggaggaaatgatgga

SEQ ID NO: 1073407 - DNA, 33 bp, Homo sapien
agcccctaacaagagaataagtctatcttttga

SEQ ID NO: 1073408 - DNA, 33 bp, Homo sapien
agcccctaacaagagagtaagtctatcttttga

SEQ ID NO: 1073409 - DNA, 33 bp, Homo sapien
acaaaaagatacaaacccattataagagccagc

SEQ ID NO: 1073410 - DNA, 33 bp, Homo sapien
acaaaaagatacaaactcattataagagccagc

SEQ ID NO: 1073411 - DNA, 33 bp, Homo sapien
caaagcaagattccacagaacaaacaaaccatt

SEQ ID NO: 1073412 - DNA, 33 bp, Homo sapien
caaagcaagattccacggaacaaacaaaccatt

SEQ ID NO: 1073413 - DNA, 33 bp, Homo sapien
ttaaaatctggacaccacaaagcattttggaga

SEQ ID NO: 1073414 - DNA, 33 bp, Homo sapien
ttaaaatctggacaccgcaaagcattttggaga

SEQ ID NO: 1073415 - DNA, 33 bp, Homo sapien
aattttcatgttaacccccactccatcaggtag

SEQ ID NO: 1073416 - DNA, 33 bp, Homo sapien
aattttcatgttaacctccactccatcaggtag

SEQ ID NO: 1073417 - DNA, 33 bp, Homo sapien
ctagatattactacctcaaaatgtaaagctcct

SEQ ID NO: 1073418 - DNA, 33 bp, Homo sapien
ctagatattactacctgaaaatgtaaagctcct

SEQ ID NO: 1073419 - DNA, 33 bp, Homo sapien
atacaccgaatattcaagtagagccagatttta

SEQ ID NO: 1073420 - DNA, 33 bp, Homo sapien
atacaccgaatattcaggtagagccagatttta

SEQ ID NO: 1073421 - DNA, 33 bp, Homo sapien
cctattgttatttgcaagaggaatctctcttat

SEQ ID NO: 1073422 - DNA, 33 bp, Homo sapien
cctattgttatttgcatgaggaatctctcttat

SEQ ID NO: 1073423 - DNA, 33 bp, Homo sapien
tgagttggggagaacaataggctgtatggccag

SEQ ID NO: 1073424 - DNA, 33 bp, Homo sapien
tgagttggggagaacagtaggctgtatggccag

SEQ ID NO: 1073425 - DNA, 33 bp, Homo sapien
cagtcatctaaggatcacttccaactgtttaca

SEQ ID NO: 1073426 - DNA, 33 bp, Homo sapien
cagtcatctaaggatcgcttccaactgtttaca

SEQ ID NO: 1073427 - DNA, 33 bp, Homo sapien
tcggtaccattaaacccatcagagttcctaata

SEQ ID NO: 1073428 - DNA, 33 bp, Homo sapien
tcggtaccattaaacctatcagagttcctaata

SEQ ID NO: 1073429 - DNA, 33 bp, Homo sapien
ggttattctcaaaatcaaactgaaaacacctgg

SEQ ID NO: 1073430 - DNA, 33 bp, Homo sapien
ggttattctcaaaatcgaactgaaaacacctgg

SEQ ID NO: 1073431 - DNA, 33 bp, Homo sapien
tatcttccgaagtgtaacctaccacaatatttt

SEQ ID NO: 1073432 - DNA, 33 bp, Homo sapien
tatcttccgaagtgtagcctaccacaatatttt

SEQ ID NO: 1073433 - DNA, 33 bp, Homo sapien
cttaaatccaagtagacctctagtttatcttac

SEQ ID NO: 1073434 - DNA, 33 bp, Homo sapien
cttaaatccaagtagagctctagtttatcttac

SEQ ID NO: 1073435 - DNA, 33 bp, Homo sapien
ccaaattcatagttcaacttaaatccaagtaga

SEQ ID NO: 1073436 - DNA, 33 bp, Homo sapien
ccaaattcatagttcagcttaaatccaagtaga

SEQ ID NO: 1073437 - DNA, 33 bp, Homo sapien
ctcagagatctttgtgcataagaggtagctagg

SEQ ID NO: 1073438 - DNA, 33 bp, Homo sapien
ctcagagatctttgtgtataagaggtagctagg

SEQ ID NO: 1073439 - DNA, 33 bp, Homo sapien
cacactctactctcaacatagcaaccaggttta

SEQ ID NO: 1073440 - DNA, 33 bp, Homo sapien
cacactctactctcaatatagcaaccaggttta

SEQ ID NO: 1073441 - DNA, 33 bp, Homo sapien
ccactaccaaaaatatcagtgccattagacatg

SEQ ID NO: 1073442 - DNA, 33 bp, Homo sapien
ccactaccaaaaatatgagtgccattagacatg

SEQ ID NO: 1073443 - DNA, 33 bp, Homo sapien
tgtcttccttgtgatcgcttccctgaggcagtg

SEQ ID NO: 1073444 - DNA, 33 bp, Homo sapien
tgtcttccttgtgatctcttccctgaggcagtg

SEQ ID NO: 1073445 - DNA, 33 bp, Homo sapien
taaattattaaatgtaagcaatattcagctcat

SEQ ID NO: 1073446 - DNA, 33 bp, Homo sapien
taaattattaaatgtaggcaatattcagctcat

SEQ ID NO: 1073447 - DNA, 33 bp, Homo sapien
ctgaacaagagtcccactagaaggttgttgtag

SEQ ID NO: 1073448 - DNA, 33 bp, Homo sapien
ctgaacaagagtcccattagaaggttgttgtag

SEQ ID NO: 1073449 - DNA, 33 bp, Homo sapien
tacaaagaaaagactgaaaaatccattctggca

SEQ ID NO: 1073450 - DNA, 33 bp, Homo sapien
tacaaagaaaagactggaaaatccattctggca

SEQ ID NO: 1073451 - DNA, 33 bp, Homo sapien
tgtacccaagtactgaaaaccactgtcatattc

SEQ ID NO: 1073452 - DNA, 33 bp, Homo sapien
tgtacccaagtactgataaccactgtcatattc

SEQ ID NO: 1073453 - DNA, 33 bp, Homo sapien
taaaggtagatatgtcactgtgcatttcatttc

SEQ ID NO: 1073454 - DNA, 33 bp, Homo sapien
taaaggtagatatgtcgctgtgcatttcatttc

SEQ ID NO: 1073455 - DNA, 33 bp, Homo sapien
atttaaataagggtccacagtcattgtatatta

SEQ ID NO: 1073456 - DNA, 33 bp, Homo sapien
atttaaataagggtccgcagtcattgtatatta

SEQ ID NO: 1073457 - DNA, 33 bp, Homo sapien
agaaatcaggttgaaaaatgaacttaacacaac

SEQ ID NO: 1073458 - DNA, 33 bp, Homo sapien
agaaatcaggttgaaacatgaacttaacacaac

SEQ ID NO: 1073459 - DNA, 33 bp, Homo sapien
gccaatatttgaccttaaaacatgcaaatctga

SEQ ID NO: 1073460 - DNA, 33 bp, Homo sapien
gccaatatttgaccttgaaacatgcaaatctga

SEQ ID NO: 1073461 - DNA, 33 bp, Homo sapien
aaaataacaaatggtgacaaagatgtggataaa

SEQ ID NO: 1073462 - DNA, 33 bp, Homo sapien
aaaataacaaatggtggcaaagatgtggataaa

SEQ ID NO: 1073463 - DNA, 33 bp, Homo sapien
gccttctgtgttaaaacagcagccttgcctcca

SEQ ID NO: 1073464 - DNA, 33 bp, Homo sapien
gccttctgtgttaaaagagcagccttgcctcca

SEQ ID NO: 1073465 - DNA, 33 bp, Homo sapien
actgcaccttgagttcaaatgtctttcactgct

SEQ ID NO: 1073466 - DNA, 33 bp, Homo sapien
actgcaccttgagttcgaatgtctttcactgct

SEQ ID NO: 1073467 - DNA, 33 bp, Homo sapien
gagaccatttgggaacagaaaaatgcacacagg

SEQ ID NO: 1073468 - DNA, 33 bp, Homo sapien
gagaccatttgggaacggaaaaatgcacacagg

SEQ ID NO: 1073469 - DNA, 33 bp, Homo sapien
atttcaactctttatcactctcctgaattgagc

SEQ ID NO: 1073470 - DNA, 33 bp, Homo sapien
atttcaactctttatcgctctcctgaattgagc

SEQ ID NO: 1073471 - DNA, 33 bp, Homo sapien
agaaaaccaaatgtgacgatttaaatgaaaaaa

SEQ ID NO: 1073472 - DNA, 33 bp, Homo sapien
agaaaaccaaatgtgatgatttaaatgaaaaaa

SEQ ID NO: 1073473 - DNA, 33 bp, Homo sapien
tttcagtctccatttcgctaaaccttcatgcag

SEQ ID NO: 1073474 - DNA, 33 bp, Homo sapien
tttcagtctccatttctctaaaccttcatgcag

SEQ ID NO: 1073475 - DNA, 33 bp, Homo sapien
agagttcccattttaaatatttccagctcctag

SEQ ID NO: 1073476 - DNA, 33 bp, Homo sapien
agagttcccattttaagtatttccagctcctag

SEQ ID NO: 1073477 - DNA, 33 bp, Homo sapien
gatgggtccctaccaaactcaccatttcttctc

SEQ ID NO: 1073478 - DNA, 33 bp, Homo sapien
gatgggtccctaccaagctcaccatttcttctc

SEQ ID NO: 1073479 - DNA, 33 bp, Homo sapien
ttatttgggttgctagcatatggttgattcttt

SEQ ID NO: 1073480 - DNA, 33 bp, Homo sapien
ttatttgggttgctagtatatggttgattcttt

SEQ ID NO: 1073481 - DNA, 33 bp, Homo sapien
aataccaagtatatgaaaaatcttgaaggtctt

SEQ ID NO: 1073482 - DNA, 33 bp, Homo sapien
aataccaagtatatgacaaatcttgaaggtctt

SEQ ID NO: 1073483 - DNA, 33 bp, Homo sapien
ttttccaataccttctcacaatacccgcctctt

SEQ ID NO: 1073484 - DNA, 33 bp, Homo sapien
ttttccaataccttcttacaatacccgcctctt

SEQ ID NO: 1073485 - DNA, 33 bp, Homo sapien
atatcctattcctgcacaccagttgagactctg

SEQ ID NO: 1073486 - DNA, 33 bp, Homo sapien
atatcctattcctgcataccagttgagactctg

SEQ ID NO: 1073487 - DNA, 33 bp, Homo sapien
tgctatccctactttgaatatctcaccggtact

SEQ ID NO: 1073488 - DNA, 33 bp, Homo sapien
tgctatccctactttggatatctcaccggtact

SEQ ID NO: 1073489 - DNA, 33 bp, Homo sapien
ggttcaatttcaaaaacgagagatgagtataac

SEQ ID NO: 1073490 - DNA, 33 bp, Homo sapien
ggttcaatttcaaaaatgagagatgagtataac

SEQ ID NO: 1073491 - DNA, 33 bp, Homo sapien
ttgactgtctaaagaaaccttgctactattgga

SEQ ID NO: 1073492 - DNA, 33 bp, Homo sapien
ttgactgtctaaagaatccttgctactattgga

SEQ ID NO: 1073493 - DNA, 33 bp, Homo sapien
gctgcacagctctcagacacaaaagagacctct

SEQ ID NO: 1073494 - DNA, 33 bp, Homo sapien
gctgcacagctctcagccacaaaagagacctct

SEQ ID NO: 1073495 - DNA, 33 bp, Homo sapien
aattttcatcaccatacatttgttttcattgat

SEQ ID NO: 1073496 - DNA, 33 bp, Homo sapien
aattttcatcaccatatatttgttttcattgat

SEQ ID NO: 1073497 - DNA, 33 bp, Homo sapien
cctccatggccttaagaaaaaacaaagtggcaa

SEQ ID NO: 1073498 - DNA, 33 bp, Homo sapien
cctccatggccttaaggaaaaacaaagtggcaa

SEQ ID NO: 1073499 - DNA, 33 bp, Homo sapien
gtaaaactcaatttggaagtttgttgcaaagat

SEQ ID NO: 1073500 - DNA, 33 bp, Homo sapien
gtaaaactcaatttgggagtttgttgcaaagat

SEQ ID NO: 1073501 - DNA, 33 bp, Homo sapien
tttatcaaagttcttacagcctagtcatacttt

SEQ ID NO: 1073502 - DNA, 33 bp, Homo sapien
tttatcaaagttcttagagcctagtcatacttt

SEQ ID NO: 1073503 - DNA, 33 bp, Homo sapien
tgagtgtaccccgtgacggaatgctgtcctggc

SEQ ID NO: 1073504 - DNA, 33 bp, Homo sapien
tgagtgtaccccgtgatggaatgctgtcctggc

SEQ ID NO: 1073505 - DNA, 33 bp, Homo sapien
ttttaaaagtagagagacatacttggaataagc

SEQ ID NO: 1073506 - DNA, 33 bp, Homo sapien
ttttaaaagtagagagtcatacttggaataagc

SEQ ID NO: 1073507 - DNA, 33 bp, Homo sapien
ctaatttaactgtaaaaactaagctgaaatgtc

SEQ ID NO: 1073508 - DNA, 33 bp, Homo sapien
ctaatttaactgtaaacactaagctgaaatgtc

SEQ ID NO: 1073509 - DNA, 33 bp, Homo sapien
gagtgaaaacgagaggacagatactggggctgg

SEQ ID NO: 1073510 - DNA, 33 bp, Homo sapien
gagtgaaaacgagaggtcagatactggggctgg

SEQ ID NO: 1073511 - DNA, 33 bp, Homo sapien
ttcatcttagaactgaagtttataccctttgac

SEQ ID NO: 1073512 - DNA, 33 bp, Homo sapien
ttcatcttagaactgatgtttataccctttgac

SEQ ID NO: 1073513 - DNA, 33 bp, Homo sapien
aaaaaagcaccataaagagaaaactccgtgcat

SEQ ID NO: 1073514 - DNA, 33 bp, Homo sapien
aaaaaagcaccataaatagaaaactccgtgcat

SEQ ID NO: 1073515 - DNA, 33 bp, Homo sapien
tatgagaaagacaagagtataaaggggagagaa

SEQ ID NO: 1073516 - DNA, 33 bp, Homo sapien
tatgagaaagacaagattataaaggggagagaa

SEQ ID NO: 1073517 - DNA, 33 bp, Homo sapien
cttccctggacccataaaatgaagtgtacttta

SEQ ID NO: 1073518 - DNA, 33 bp, Homo sapien
cttccctggacccatacaatgaagtgtacttta

SEQ ID NO: 1073519 - DNA, 33 bp, Homo sapien
cttcactgatctaaaagtctgtgggatctggtt

SEQ ID NO: 1073520 - DNA, 33 bp, Homo sapien
cttcactgatctaaaattctgtgggatctggtt

SEQ ID NO: 1073521 - DNA, 33 bp, Homo sapien
aggaattcaaaaccaaaacatgaactcaggcag

SEQ ID NO: 1073522 - DNA, 33 bp, Homo sapien
aggaattcaaaaccaagacatgaactcaggcag

SEQ ID NO: 1073523 - DNA, 33 bp, Homo sapien
gtccccttttttggtaaatgtatgaactcttgg

SEQ ID NO: 1073524 - DNA, 33 bp, Homo sapien
gtccccttttttggtagatgtatgaactcttgg

SEQ ID NO: 1073525 - DNA, 33 bp, Homo sapien
ttattttgttttccataatgaatccagctttag

SEQ ID NO: 1073526 - DNA, 33 bp, Homo sapien
ttattttgttttccatgatgaatccagctttag

SEQ ID NO: 1073527 - DNA, 33 bp, Homo sapien
tagtttgtctgcagcactgaaaggaaaactgac

SEQ ID NO: 1073528 - DNA, 33 bp, Homo sapien
tagtttgtctgcagcattgaaaggaaaactgac

SEQ ID NO: 1073529 - DNA, 33 bp, Homo sapien
tcatttcttgcattaaaatgtaaatgaggtagt

SEQ ID NO: 1073530 - DNA, 33 bp, Homo sapien
tcatttcttgcattaacatgtaaatgaggtagt

SEQ ID NO: 1073531 - DNA, 33 bp, Homo sapien
gattctccttggacataaccttgaagttggacc

SEQ ID NO: 1073532 - DNA, 33 bp, Homo sapien
gattctccttggacatgaccttgaagttggacc

SEQ ID NO: 1073533 - DNA, 33 bp, Homo sapien
cattatctgatttatacgttacaaggtcattcc

SEQ ID NO: 1073534 - DNA, 33 bp, Homo sapien
cattatctgatttatatgttacaaggtcattcc

SEQ ID NO: 1073535 - DNA, 33 bp, Homo sapien
ccatgactttctttaactgagtcacattaacgc

SEQ ID NO: 1073536 - DNA, 33 bp, Homo sapien
ccatgactttctttaattgagtcacattaacgc

SEQ ID NO: 1073537 - DNA, 33 bp, Homo sapien
tttattaacatacatcaacctttgaaaataatt

SEQ ID NO: 1073538 - DNA, 33 bp, Homo sapien
tttattaacatacatccacctttgaaaataatt

SEQ ID NO: 1073539 - DNA, 33 bp, Homo sapien
tggttttacttctggaactcctctttttgcttc

SEQ ID NO: 1073540 - DNA, 33 bp, Homo sapien
tggttttacttctggagctcctctttttgcttc

SEQ ID NO: 1073541 - DNA, 33 bp, Homo sapien
aatgatgcttatttgacattaacatgaaaagtc

SEQ ID NO: 1073542 - DNA, 33 bp, Homo sapien
aatgatgcttatttgatattaacatgaaaagtc

SEQ ID NO: 1073543 - DNA, 33 bp, Homo sapien
ttaaaaattcagataaacaatctttgtctttca

SEQ ID NO: 1073544 - DNA, 33 bp, Homo sapien
ttaaaaattcagataagcaatctttgtctttca

SEQ ID NO: 1073545 - DNA, 33 bp, Homo sapien
aacaagaatgcctatccgaactccttgaataac

SEQ ID NO: 1073546 - DNA, 33 bp, Homo sapien
aacaagaatgcctatctgaactccttgaataac

SEQ ID NO: 1073547 - DNA, 33 bp, Homo sapien
gtcatataatgaggtccctttggctatatctat

SEQ ID NO: 1073548 - DNA, 33 bp, Homo sapien
gtcatataatgaggtctctttggctatatctat

SEQ ID NO: 1073549 - DNA, 33 bp, Homo sapien
tgagcaaacttttgtgcatagggaagaattatt

SEQ ID NO: 1073550 - DNA, 33 bp, Homo sapien
tgagcaaacttttgtgtatagggaagaattatt

SEQ ID NO: 1073551 - DNA, 33 bp, Homo sapien
tgttttgatactggtaccatgctgttttggttg

SEQ ID NO: 1073552 - DNA, 33 bp, Homo sapien
tgttttgatactggtagcatgctgttttggttg

SEQ ID NO: 1073553 - DNA, 33 bp, Homo sapien
ctcttctaaagtttaccgatctcttctgccata

SEQ ID NO: 1073554 - DNA, 33 bp, Homo sapien
ctcttctaaagtttactgatctcttctgccata

SEQ ID NO: 1073555 - DNA, 33 bp, Homo sapien
ttaaaacactacattaaattttggtcattaatt

SEQ ID NO: 1073556 - DNA, 33 bp, Homo sapien
ttaaaacactacattacattttggtcattaatt

SEQ ID NO: 1073557 - DNA, 33 bp, Homo sapien
atattctccaatctaaccatttcgtcccctccc

SEQ ID NO: 1073558 - DNA, 33 bp, Homo sapien
atattctccaatctaagcatttcgtcccctccc

SEQ ID NO: 1073559 - DNA, 33 bp, Homo sapien
attttgattatttttgcaacagaaaatggcaat

SEQ ID NO: 1073560 - DNA, 33 bp, Homo sapien
attttgattatttttggaacagaaaatggcaat

SEQ ID NO: 1073561 - DNA, 33 bp, Homo sapien
ccttccttcctctggtaacaagctgccttctga

SEQ ID NO: 1073562 - DNA, 33 bp, Homo sapien
ccttccttcctctggtgacaagctgccttctga

SEQ ID NO: 1073563 - DNA, 33 bp, Homo sapien
tttgtcatgtgaagaacggcagtgggatagaga

SEQ ID NO: 1073564 - DNA, 33 bp, Homo sapien
tttgtcatgtgaagaatggcagtgggatagaga

SEQ ID NO: 1073565 - DNA, 33 bp, Homo sapien
tgtataagttccaagacctatgtccctgtctga

SEQ ID NO: 1073566 - DNA, 33 bp, Homo sapien
tgtataagttccaagatctatgtccctgtctga

SEQ ID NO: 1073567 - DNA, 33 bp, Homo sapien
cgtcttcatactcccactagcaaagtacgagtg

SEQ ID NO: 1073568 - DNA, 33 bp, Homo sapien
cgtcttcatactcccagtagcaaagtacgagtg

SEQ ID NO: 1073569 - DNA, 33 bp, Homo sapien
aatgggataccatgaacaattgccagtagctaa

SEQ ID NO: 1073570 - DNA, 33 bp, Homo sapien
aatgggataccatgaataattgccagtagctaa

SEQ ID NO: 1073571 - DNA, 33 bp, Homo sapien
ctgtaaactggtttgaccattgtggaagaccgt

SEQ ID NO: 1073572 - DNA, 33 bp, Homo sapien
ctgtaaactggtttgatcattgtggaagaccgt

SEQ ID NO: 1073573 - DNA, 33 bp, Homo sapien
taggaaggaggctgaaacactgttattgtcaga

SEQ ID NO: 1073574 - DNA, 33 bp, Homo sapien
taggaaggaggctgaatcactgttattgtcaga

SEQ ID NO: 1073575 - DNA, 33 bp, Homo sapien
atgtaagcccagggaaatagtaattgcagtctt

SEQ ID NO: 1073576 - DNA, 33 bp, Homo sapien
atgtaagcccagggaactagtaattgcagtctt

SEQ ID NO: 1073577 - DNA, 33 bp, Homo sapien
agagagttgtctataaatgctctctcaattctt

SEQ ID NO: 1073578 - DNA, 33 bp, Homo sapien
agagagttgtctataactgctctctcaattctt

SEQ ID NO: 1073579 - DNA, 33 bp, Homo sapien
tctgacctttttcctcggaacaacaggcctatt

SEQ ID NO: 1073580 - DNA, 33 bp, Homo sapien
tctgacctttttcctctgaacaacaggcctatt

SEQ ID NO: 1073581 - DNA, 33 bp, Homo sapien
aaaagattcctcatgacagaactgatggatgtt

SEQ ID NO: 1073582 - DNA, 33 bp, Homo sapien
aaaagattcctcatgatagaactgatggatgtt

SEQ ID NO: 1073583 - DNA, 33 bp, Homo sapien
agggtgaccataaagaaaaacaattctgggagg

SEQ ID NO: 1073584 - DNA, 33 bp, Homo sapien
agggtgaccataaagagaaacaattctgggagg

SEQ ID NO: 1073585 - DNA, 33 bp, Homo sapien
tcctgggtgttattgaaaattgtgaggttcagg

SEQ ID NO: 1073586 - DNA, 33 bp, Homo sapien
tcctgggtgttattgagaattgtgaggttcagg

SEQ ID NO: 1073587 - DNA, 33 bp, Homo sapien
tctagacatccctgaccatttaaattgtatccc

SEQ ID NO: 1073588 - DNA, 33 bp, Homo sapien
tctagacatccctgactatttaaattgtatccc

SEQ ID NO: 1073589 - DNA, 33 bp, Homo sapien
tcaccccagactgaaaaaaggcaattgcttcct

SEQ ID NO: 1073590 - DNA, 33 bp, Homo sapien
tcaccccagactgaaagaaggcaattgcttcct

SEQ ID NO: 1073591 - DNA, 33 bp, Homo sapien
attatttctctttcccacaattagttcagtgaa

SEQ ID NO: 1073592 - DNA, 33 bp, Homo sapien
attatttctctttcccgcaattagttcagtgaa

SEQ ID NO: 1073593 - DNA, 33 bp, Homo sapien
aatatttaatatctggaactcaaactttcacac

SEQ ID NO: 1073594 - DNA, 33 bp, Homo sapien
aatatttaatatctgggactcaaactttcacac

SEQ ID NO: 1073595 - DNA, 33 bp, Homo sapien
gagaaatgtatttatgaatggaatgagggtgta

SEQ ID NO: 1073596 - DNA, 33 bp, Homo sapien
gagaaatgtatttatggatggaatgagggtgta

SEQ ID NO: 1073597 - DNA, 33 bp, Homo sapien
taggggtgagtgtagacggagtaaagataaaag

SEQ ID NO: 1073598 - DNA, 33 bp, Homo sapien
taggggtgagtgtagatggagtaaagataaaag

SEQ ID NO: 1073599 - DNA, 33 bp, Homo sapien
tcatcttggaggcaaacgtaattttcttagtac

SEQ ID NO: 1073600 - DNA, 33 bp, Homo sapien
tcatcttggaggcaaatgtaattttcttagtac

SEQ ID NO: 1073601 - DNA, 33 bp, Homo sapien
taatgtactcaaatcaatacttttctatataca

SEQ ID NO: 1073602 - DNA, 33 bp, Homo sapien
taatgtactcaaatcagtacttttctatataca

SEQ ID NO: 1073603 - DNA, 33 bp, Homo sapien
tgaaactgcacctgaacgaatgaataagagcac

SEQ ID NO: 1073604 - DNA, 33 bp, Homo sapien
tgaaactgcacctgaatgaatgaataagagcac

SEQ ID NO: 1073605 - DNA, 33 bp, Homo sapien
agttaactatggcctaaaaatacattttatttc

SEQ ID NO: 1073606 - DNA, 33 bp, Homo sapien
agttaactatggcctacaaatacattttatttc

SEQ ID NO: 1073607 - DNA, 33 bp, Homo sapien
tccatctaatgctctaactccagtcatcacttc

SEQ ID NO: 1073608 - DNA, 33 bp, Homo sapien
tccatctaatgctctatctccagtcatcacttc

SEQ ID NO: 1073609 - DNA, 33 bp, Homo sapien
agctgttagtgctcaacctaatggtgagttcat

SEQ ID NO: 1073610 - DNA, 33 bp, Homo sapien
agctgttagtgctcaatctaatggtgagttcat

SEQ ID NO: 1073611 - DNA, 33 bp, Homo sapien
aaaaatctgaggaaaacatgagtggtcggaggg

SEQ ID NO: 1073612 - DNA, 33 bp, Homo sapien
aaaaatctgaggaaaatatgagtggtcggaggg

SEQ ID NO: 1073613 - DNA, 33 bp, Homo sapien
ccatcgtagtagaggagtatgtatgaagaacac

SEQ ID NO: 1073614 - DNA, 33 bp, Homo sapien
ccatcgtagtagaggattatgtatgaagaacac

SEQ ID NO: 1073615 - DNA, 33 bp, Homo sapien
gaagactgaaactgtacctgagcctctatctgt

SEQ ID NO: 1073616 - DNA, 33 bp, Homo sapien
gaagactgaaactgtagctgagcctctatctgt

SEQ ID NO: 1073617 - DNA, 33 bp, Homo sapien
cttccattatccccacaagaaacaatagtctat

SEQ ID NO: 1073618 - DNA, 33 bp, Homo sapien
cttccattatccccacgagaaacaatagtctat

SEQ ID NO: 1073619 - DNA, 33 bp, Homo sapien
ggagacattcaaactacaacaacctgtcacgta

SEQ ID NO: 1073620 - DNA, 33 bp, Homo sapien
ggagacattcaaactataacaacctgtcacgta

SEQ ID NO: 1073621 - DNA, 33 bp, Homo sapien
gttagttttagcttcaaagttctctgttatctt

SEQ ID NO: 1073622 - DNA, 33 bp, Homo sapien
gttagttttagcttcatagttctctgttatctt

SEQ ID NO: 1073623 - DNA, 33 bp, Homo sapien
acctgctctattagaccagttgtatatatggtt

SEQ ID NO: 1073624 - DNA, 33 bp, Homo sapien
acctgctctattagactagttgtatatatggtt

SEQ ID NO: 1073625 - DNA, 33 bp, Homo sapien
tgtctcttcagaatcaatatcgtcattaccttg

SEQ ID NO: 1073626 - DNA, 33 bp, Homo sapien
tgtctcttcagaatcactatcgtcattaccttg

SEQ ID NO: 1073627 - DNA, 33 bp, Homo sapien
cagcctctgggaaaagacatcctttctagtgga

SEQ ID NO: 1073628 - DNA, 33 bp, Homo sapien
cagcctctgggaaaaggcatcctttctagtgga

SEQ ID NO: 1073629 - DNA, 33 bp, Homo sapien
aaaatgtgtctatgatcaggaatgtaagcactc

SEQ ID NO: 1073630 - DNA, 33 bp, Homo sapien
aaaatgtgtctatgattaggaatgtaagcactc

SEQ ID NO: 1073631 - DNA, 33 bp, Homo sapien
gttaaaaatccactaacggcattgaagggacca

SEQ ID NO: 1073632 - DNA, 33 bp, Homo sapien
gttaaaaatccactaatggcattgaagggacca

SEQ ID NO: 1073633 - DNA, 33 bp, Homo sapien
tcataattaaccctgcaagaattaacgtccgtg

SEQ ID NO: 1073634 - DNA, 33 bp, Homo sapien
tcataattaaccctgccagaattaacgtccgtg

SEQ ID NO: 1073635 - DNA, 33 bp, Homo sapien
ttgttaactataaagaaatcccttgtaaacttt

SEQ ID NO: 1073636 - DNA, 33 bp, Homo sapien
ttgttaactataaagagatcccttgtaaacttt

SEQ ID NO: 1073637 - DNA, 33 bp, Homo sapien
ctggcccaagtcagaaacaactctcacctagaa

SEQ ID NO: 1073638 - DNA, 33 bp, Homo sapien
ctggcccaagtcagaatcaactctcacctagaa

SEQ ID NO: 1073639 - DNA, 33 bp, Homo sapien
tgtagagtaacagttaagagctccaattttgcc

SEQ ID NO: 1073640 - DNA, 33 bp, Homo sapien
tgtagagtaacagttaggagctccaattttgcc

SEQ ID NO: 1073641 - DNA, 33 bp, Homo sapien
tatttcctggttataacgcacatactgagttgg

SEQ ID NO: 1073642 - DNA, 33 bp, Homo sapien
tatttcctggttataatgcacatactgagttgg

SEQ ID NO: 1073643 - DNA, 33 bp, Homo sapien
gctgccaaactaagaaatatatgcaaccacgtt

SEQ ID NO: 1073644 - DNA, 33 bp, Homo sapien
gctgccaaactaagaagtatatgcaaccacgtt

SEQ ID NO: 1073645 - DNA, 33 bp, Homo sapien
tataacaattgtccgaggatgtctggaatttag

SEQ ID NO: 1073646 - DNA, 33 bp, Homo sapien
tataacaattgtccgatgatgtctggaatttag

SEQ ID NO: 1073647 - DNA, 33 bp, Homo sapien
gttatttgaggtaattaaagcgtcttgtgtcag

SEQ ID NO: 1073648 - DNA, 33 bp, Homo sapien
gttatttgaggtaatttaagcgtcttgtgtcag

SEQ ID NO: 1073649 - DNA, 33 bp, Homo sapien
atgcacctacagactgcatttctgagccggttc

SEQ ID NO: 1073650 - DNA, 33 bp, Homo sapien
atgcacctacagactgtatttctgagccggttc

SEQ ID NO: 1073651 - DNA, 33 bp, Homo sapien
atcaattttttattccccaagtggctttgtaaa

SEQ ID NO: 1073652 - DNA, 33 bp, Homo sapien
atcaattttttattcctcaagtggctttgtaaa

SEQ ID NO: 1073653 - DNA, 33 bp, Homo sapien
acataactgattaacaagctgcaaatagagtta

SEQ ID NO: 1073654 - DNA, 33 bp, Homo sapien
acataactgattaacacgctgcaaatagagtta

SEQ ID NO: 1073655 - DNA, 33 bp, Homo sapien
taccactcatcaaagacggctacactgactaga

SEQ ID NO: 1073656 - DNA, 33 bp, Homo sapien
taccactcatcaaagatggctacactgactaga

SEQ ID NO: 1073657 - DNA, 33 bp, Homo sapien
ttatcttgaatttgtaagcaatgtggcaaccag

SEQ ID NO: 1073658 - DNA, 33 bp, Homo sapien
ttatcttgaatttgtaggcaatgtggcaaccag

SEQ ID NO: 1073659 - DNA, 33 bp, Homo sapien
ctctggacttaagctacctaagataaggcaaca

SEQ ID NO: 1073660 - DNA, 33 bp, Homo sapien
ctctggacttaagctatctaagataaggcaaca

SEQ ID NO: 1073661 - DNA, 33 bp, Homo sapien
agttaacagaaatcaccggatcacaccaggcac

SEQ ID NO: 1073662 - DNA, 33 bp, Homo sapien
agttaacagaaatcactggatcacaccaggcac

SEQ ID NO: 1073663 - DNA, 33 bp, Homo sapien
gccaccctatggcttgacaactagactaggctg

SEQ ID NO: 1073664 - DNA, 33 bp, Homo sapien
gccaccctatggcttggcaactagactaggctg

SEQ ID NO: 1073665 - DNA, 33 bp, Homo sapien
cttaacactctacaataatctgaggtcagtcaa

SEQ ID NO: 1073666 - DNA, 33 bp, Homo sapien
cttaacactctacaattatctgaggtcagtcaa

SEQ ID NO: 1073667 - DNA, 33 bp, Homo sapien
caaggccatatggtcaaaagtggcccagcaggc

SEQ ID NO: 1073668 - DNA, 33 bp, Homo sapien
caaggccatatggtcagaagtggcccagcaggc

SEQ ID NO: 1073669 - DNA, 33 bp, Homo sapien
tttgactcctacactcactaggacagttacaaa

SEQ ID NO: 1073670 - DNA, 33 bp, Homo sapien
tttgactcctacactcgctaggacagttacaaa

SEQ ID NO: 1073671 - DNA, 33 bp, Homo sapien
cacagaagtcccctgacgcagaattactaataa

SEQ ID NO: 1073672 - DNA, 33 bp, Homo sapien
cacagaagtcccctgatgcagaattactaataa

SEQ ID NO: 1073673 - DNA, 33 bp, Homo sapien
aacagtgggtctctcactcactgccttgaaaga

SEQ ID NO: 1073674 - DNA, 33 bp, Homo sapien
aacagtgggtctctcattcactgccttgaaaga

SEQ ID NO: 1073675 - DNA, 33 bp, Homo sapien
aaaagtctcagaagtacactcagtgaatcccat

SEQ ID NO: 1073676 - DNA, 33 bp, Homo sapien
aaaagtctcagaagtatactcagtgaatcccat

SEQ ID NO: 1073677 - DNA, 33 bp, Homo sapien
gttgaatcaaacctgacgttcagtggggtaaca

SEQ ID NO: 1073678 - DNA, 33 bp, Homo sapien
gttgaatcaaacctgatgttcagtggggtaaca

SEQ ID NO: 1073679 - DNA, 33 bp, Homo sapien
ctgattattttctattcaactcccttactactt

SEQ ID NO: 1073680 - DNA, 33 bp, Homo sapien
ctgattattttctattgaactcccttactactt

SEQ ID NO: 1073681 - DNA, 33 bp, Homo sapien
gagcacttgcatggaaatcagaggagcaatctc

SEQ ID NO: 1073682 - DNA, 33 bp, Homo sapien
gagcacttgcatggaattcagaggagcaatctc

SEQ ID NO: 1073683 - DNA, 33 bp, Homo sapien
tcccttttacaggctaccattatacttggcaca

SEQ ID NO: 1073684 - DNA, 33 bp, Homo sapien
tcccttttacaggctatcattatacttggcaca

SEQ ID NO: 1073685 - DNA, 33 bp, Homo sapien
gatatttcttaagggacgagttattcaatctct

SEQ ID NO: 1073686 - DNA, 33 bp, Homo sapien
gatatttcttaagggatgagttattcaatctct

SEQ ID NO: 1073687 - DNA, 33 bp, Homo sapien
gtaaaatcaccactgggataatttgctgagtca

SEQ ID NO: 1073688 - DNA, 33 bp, Homo sapien
gtaaaatcaccactggtataatttgctgagtca

SEQ ID NO: 1073689 - DNA, 33 bp, Homo sapien
ttagctcatctatgtgcatactgttgctaatta

SEQ ID NO: 1073690 - DNA, 33 bp, Homo sapien
ttagctcatctatgtgtatactgttgctaatta

SEQ ID NO: 1073691 - DNA, 33 bp, Homo sapien
gggaattctgtttccacagtatctgaacacata

SEQ ID NO: 1073692 - DNA, 33 bp, Homo sapien
gggaattctgtttccatagtatctgaacacata

SEQ ID NO: 1073693 - DNA, 33 bp, Homo sapien
ccttgaggaagtactgaaaatccctttgtcttt

SEQ ID NO: 1073694 - DNA, 33 bp, Homo sapien
ccttgaggaagtactggaaatccctttgtcttt

SEQ ID NO: 1073695 - DNA, 33 bp, Homo sapien
caattagctttgcaaaatggaaagttactggtc

SEQ ID NO: 1073696 - DNA, 33 bp, Homo sapien
caattagctttgcaaagtggaaagttactggtc

SEQ ID NO: 1073697 - DNA, 33 bp, Homo sapien
agaggccagatgactgaagaccaagttatagga

SEQ ID NO: 1073698 - DNA, 33 bp, Homo sapien
agaggccagatgactgcagaccaagttatagga

SEQ ID NO: 1073699 - DNA, 33 bp, Homo sapien
gtccacccctgatagaacttggagatttgttcc

SEQ ID NO: 1073700 - DNA, 33 bp, Homo sapien
gtccacccctgatagatcttggagatttgttcc

SEQ ID NO: 1073701 - DNA, 33 bp, Homo sapien
aggtcagaacatcgggaccactcatttttttct

SEQ ID NO: 1073702 - DNA, 33 bp, Homo sapien
aggtcagaacatcggggccactcatttttttct

SEQ ID NO: 1073703 - DNA, 33 bp, Homo sapien
ggtgtttattttttccaagtcaggaggcccaat

SEQ ID NO: 1073704 - DNA, 33 bp, Homo sapien
ggtgtttattttttcccagtcaggaggcccaat

SEQ ID NO: 1073705 - DNA, 33 bp, Homo sapien
ctcttcacttggtactaaatgtgaattatccat

SEQ ID NO: 1073706 - DNA, 33 bp, Homo sapien
ctcttcacttggtactgaatgtgaattatccat

SEQ ID NO: 1073707 - DNA, 33 bp, Homo sapien
ggggtagccttacacaacaatgactttccttaa

SEQ ID NO: 1073708 - DNA, 33 bp, Homo sapien
ggggtagccttacacagcaatgactttccttaa

SEQ ID NO: 1073709 - DNA, 33 bp, Homo sapien
tctgccagatttaactaacagattttgaagctg

SEQ ID NO: 1073710 - DNA, 33 bp, Homo sapien
tctgccagatttaactgacagattttgaagctg

SEQ ID NO: 1073711 - DNA, 33 bp, Homo sapien
ggtgtagaagaccttgaagatttactaatccag

SEQ ID NO: 1073712 - DNA, 33 bp, Homo sapien
ggtgtagaagaccttggagatttactaatccag

SEQ ID NO: 1073713 - DNA, 33 bp, Homo sapien
gagcctgcatttggtacagcaagtaaattccac

SEQ ID NO: 1073714 - DNA, 33 bp, Homo sapien
gagcctgcatttggtatagcaagtaaattccac

SEQ ID NO: 1073715 - DNA, 33 bp, Homo sapien
ctgatcctgaaaggaacgtaagcacacctcaag

SEQ ID NO: 1073716 - DNA, 33 bp, Homo sapien
ctgatcctgaaaggaatgtaagcacacctcaag

SEQ ID NO: 1073717 - DNA, 33 bp, Homo sapien
tttcctttgaaacataaatccttaataggaaca

SEQ ID NO: 1073718 - DNA, 33 bp, Homo sapien
tttcctttgaaacatacatccttaataggaaca

SEQ ID NO: 1073719 - DNA, 33 bp, Homo sapien
gattcaatagaccccaaatattttgcattgaca

SEQ ID NO: 1073720 - DNA, 33 bp, Homo sapien
gattcaatagaccccagatattttgcattgaca

SEQ ID NO: 1073721 - DNA, 33 bp, Homo sapien
cagctcagtcttaataacagtggagtaggggcc

SEQ ID NO: 1073722 - DNA, 33 bp, Homo sapien
cagctcagtcttaatagcagtggagtaggggcc

SEQ ID NO: 1073723 - DNA, 33 bp, Homo sapien
cagccctctcttagccacagtcacaacttctta

SEQ ID NO: 1073724 - DNA, 33 bp, Homo sapien
cagccctctcttagccgcagtcacaacttctta

SEQ ID NO: 1073725 - DNA, 33 bp, Homo sapien
acacagcaattttatgacagggccagggctaga

SEQ ID NO: 1073726 - DNA, 33 bp, Homo sapien
acacagcaattttatggcagggccagggctaga

SEQ ID NO: 1073727 - DNA, 33 bp, Homo sapien
acttgctccagaattacgtatcaaaggtcaaaa

SEQ ID NO: 1073728 - DNA, 33 bp, Homo sapien
acttgctccagaattatgtatcaaaggtcaaaa

SEQ ID NO: 1073729 - DNA, 33 bp, Homo sapien
gcctgcctggctcctacgaagaaaacttcctga

SEQ ID NO: 1073730 - DNA, 33 bp, Homo sapien
gcctgcctggctcctatgaagaaaacttcctga

SEQ ID NO: 1073731 - DNA, 33 bp, Homo sapien
tagtagatgctgacaaaagagagagaattataa

SEQ ID NO: 1073732 - DNA, 33 bp, Homo sapien
tagtagatgctgacaagagagagagaattataa

SEQ ID NO: 1073733 - DNA, 33 bp, Homo sapien
aagaggaagccctataagaagaatgggaagctc

SEQ ID NO: 1073734 - DNA, 33 bp, Homo sapien
aagaggaagccctatatgaagaatgggaagctc

SEQ ID NO: 1073735 - DNA, 33 bp, Homo sapien
ccaacagtaggagctcaattgaattaattaatt

SEQ ID NO: 1073736 - DNA, 33 bp, Homo sapien
ccaacagtaggagctcgattgaattaattaatt

SEQ ID NO: 1073737 - DNA, 33 bp, Homo sapien
ttgtcaaatggaaagagtagataaagcctgact

SEQ ID NO: 1073738 - DNA, 33 bp, Homo sapien
ttgtcaaatggaaagattagataaagcctgact

SEQ ID NO: 1073739 - DNA, 33 bp, Homo sapien
gcaggtatttcttgataagccttgaatggcctg

SEQ ID NO: 1073740 - DNA, 33 bp, Homo sapien
gcaggtatttcttgatcagccttgaatggcctg

SEQ ID NO: 1073741 - DNA, 33 bp, Homo sapien
taaagacaccgtgttgaaccacataatttgaag

SEQ ID NO: 1073742 - DNA, 33 bp, Homo sapien
taaagacaccgtgttggaccacataatttgaag

SEQ ID NO: 1073743 - DNA, 33 bp, Homo sapien
gctcaacaatatgtccgcaggatccatagaccc

SEQ ID NO: 1073744 - DNA, 33 bp, Homo sapien
gctcaacaatatgtcctcaggatccatagaccc

SEQ ID NO: 1073745 - DNA, 33 bp, Homo sapien
attttctcttgagcaaccccatctgaaattaaa

SEQ ID NO: 1073746 - DNA, 33 bp, Homo sapien
attttctcttgagcaatcccatctgaaattaaa

SEQ ID NO: 1073747 - DNA, 33 bp, Homo sapien
ccagtattcattgataaagaggcaattagctgt

SEQ ID NO: 1073748 - DNA, 33 bp, Homo sapien
ccagtattcattgatagagaggcaattagctgt

SEQ ID NO: 1073749 - DNA, 33 bp, Homo sapien
ttgtctttcctctggcacgttggtgtatgtgaa

SEQ ID NO: 1073750 - DNA, 33 bp, Homo sapien
ttgtctttcctctggcgcgttggtgtatgtgaa

SEQ ID NO: 1073751 - DNA, 33 bp, Homo sapien
ctagaaagctgctaagactcttgactaaaagct

SEQ ID NO: 1073752 - DNA, 33 bp, Homo sapien
ctagaaagctgctaaggctcttgactaaaagct

SEQ ID NO: 1073753 - DNA, 33 bp, Homo sapien
ttatggacactttaggacaaaggatagtatgct

SEQ ID NO: 1073754 - DNA, 33 bp, Homo sapien
ttatggacactttaggtcaaaggatagtatgct

SEQ ID NO: 1073755 - DNA, 33 bp, Homo sapien
cgtgatagagttgtgaagcagattataaagagt

SEQ ID NO: 1073756 - DNA, 33 bp, Homo sapien
cgtgatagagttgtgacgcagattataaagagt

SEQ ID NO: 1073757 - DNA, 33 bp, Homo sapien
ttataaacttggaatcagaggaataaacttggg

SEQ ID NO: 1073758 - DNA, 33 bp, Homo sapien
ttataaacttggaatcggaggaataaacttggg

SEQ ID NO: 1073759 - DNA, 33 bp, Homo sapien
atctgtataaacttaacaggtgctcagtgaata

SEQ ID NO: 1073760 - DNA, 33 bp, Homo sapien
atctgtataaacttaataggtgctcagtgaata

SEQ ID NO: 1073761 - DNA, 33 bp, Homo sapien
ccaactgctgtagtcaaaggctctcctgttaac

SEQ ID NO: 1073762 - DNA, 33 bp, Homo sapien
ccaactgctgtagtcacaggctctcctgttaac

SEQ ID NO: 1073763 - DNA, 33 bp, Homo sapien
atggtgtttcaacatacgtaattttgacaacaa

SEQ ID NO: 1073764 - DNA, 33 bp, Homo sapien
atggtgtttcaacatatgtaattttgacaacaa

SEQ ID NO: 1073765 - DNA, 33 bp, Homo sapien
acccattggttgttcaatagcgtattgtttagt

SEQ ID NO: 1073766 - DNA, 33 bp, Homo sapien
acccattggttgttcagtagcgtattgtttagt

SEQ ID NO: 1073767 - DNA, 33 bp, Homo sapien
tgacaaatcagagactcaagaaatgccagaggt

SEQ ID NO: 1073768 - DNA, 33 bp, Homo sapien
tgacaaatcagagactgaagaaatgccagaggt

SEQ ID NO: 1073769 - DNA, 33 bp, Homo sapien
ttggaaacaatatccaggtggaaaactgaccca

SEQ ID NO: 1073770 - DNA, 33 bp, Homo sapien
ttggaaacaatatccatgtggaaaactgaccca

SEQ ID NO: 1073771 - DNA, 33 bp, Homo sapien
ggcagaggaagggcaaattgactctctgtgctt

SEQ ID NO: 1073772 - DNA, 33 bp, Homo sapien
ggcagaggaagggcaagttgactctctgtgctt

SEQ ID NO: 1073773 - DNA, 33 bp, Homo sapien
ttgcattacttttatagctgcttcacgtaagtc

SEQ ID NO: 1073774 - DNA, 33 bp, Homo sapien
ttgcattacttttatatctgcttcacgtaagtc

SEQ ID NO: 1073775 - DNA, 33 bp, Homo sapien
ttcagaactaggcatacataacgctaacttcta

SEQ ID NO: 1073776 - DNA, 33 bp, Homo sapien
ttcagaactaggcatatataacgctaacttcta

SEQ ID NO: 1073777 - DNA, 33 bp, Homo sapien
gggaccagttctttccaattccaacatttcaaa

SEQ ID NO: 1073778 - DNA, 33 bp, Homo sapien
gggaccagttctttccgattccaacatttcaaa

SEQ ID NO: 1073779 - DNA, 33 bp, Homo sapien
agtgtctagaagggaaagcaagtttagatatga

SEQ ID NO: 1073780 - DNA, 33 bp, Homo sapien
agtgtctagaagggaaggcaagtttagatatga

SEQ ID NO: 1073781 - DNA, 33 bp, Homo sapien
ggctgaagccatcccaaattttgcaaattggcc

SEQ ID NO: 1073782 - DNA, 33 bp, Homo sapien
ggctgaagccatcccatattttgcaaattggcc

SEQ ID NO: 1073783 - DNA, 33 bp, Homo sapien
ctaccttcctatccaaatgcctccttgaaaatc

SEQ ID NO: 1073784 - DNA, 33 bp, Homo sapien
ctaccttcctatccaagtgcctccttgaaaatc

SEQ ID NO: 1073785 - DNA, 33 bp, Homo sapien
tagagtcagtttaacactctttttctaagggct

SEQ ID NO: 1073786 - DNA, 33 bp, Homo sapien
tagagtcagtttaacagtctttttctaagggct

SEQ ID NO: 1073787 - DNA, 33 bp, Homo sapien
ctgacttggttgccaaccttttgagaaaaatca

SEQ ID NO: 1073788 - DNA, 33 bp, Homo sapien
ctgacttggttgccaagcttttgagaaaaatca

SEQ ID NO: 1073789 - DNA, 33 bp, Homo sapien
gtcatataacacacggaaaagacaggcaccaga

SEQ ID NO: 1073790 - DNA, 33 bp, Homo sapien
gtcatataacacacgggaaagacaggcaccaga

SEQ ID NO: 1073791 - DNA, 33 bp, Homo sapien
tgccccttcagagaaacgtgctcggaactcagt

SEQ ID NO: 1073792 - DNA, 33 bp, Homo sapien
tgccccttcagagaaatgtgctcggaactcagt

SEQ ID NO: 1073793 - DNA, 33 bp, Homo sapien
cagaaaatgtctgccaatcatctgttgaatgca

SEQ ID NO: 1073794 - DNA, 33 bp, Homo sapien
cagaaaatgtctgccagtcatctgttgaatgca

SEQ ID NO: 1073795 - DNA, 33 bp, Homo sapien
caccctcctctcatgcagcagttcagttgtagc

SEQ ID NO: 1073796 - DNA, 33 bp, Homo sapien
caccctcctctcatgcggcagttcagttgtagc

SEQ ID NO: 1073797 - DNA, 33 bp, Homo sapien
tagtagacatatcaacggaggaaaagtattact

SEQ ID NO: 1073798 - DNA, 33 bp, Homo sapien
tagtagacatatcaactgaggaaaagtattact

SEQ ID NO: 1073799 - DNA, 33 bp, Homo sapien
cgggcatatgaaggcaatctttcctctgtcctc

SEQ ID NO: 1073800 - DNA, 33 bp, Homo sapien
cgggcatatgaaggcagtctttcctctgtcctc

SEQ ID NO: 1073801 - DNA, 33 bp, Homo sapien
agtgaactgggtgagacccaaatgagatgaaag

SEQ ID NO: 1073802 - DNA, 33 bp, Homo sapien
agtgaactgggtgagatccaaatgagatgaaag

SEQ ID NO: 1073803 - DNA, 33 bp, Homo sapien
gtgatacagaatacagccgcttaaggaataagg

SEQ ID NO: 1073804 - DNA, 33 bp, Homo sapien
gtgatacagaatacagtcgcttaaggaataagg

SEQ ID NO: 1073805 - DNA, 33 bp, Homo sapien
caagctctgaatagctcaccagtagcctttgaa

SEQ ID NO: 1073806 - DNA, 33 bp, Homo sapien
caagctctgaatagcttaccagtagcctttgaa

SEQ ID NO: 1073807 - DNA, 33 bp, Homo sapien
taagtcatgtgatctcactggactatgggatgc

SEQ ID NO: 1073808 - DNA, 33 bp, Homo sapien
taagtcatgtgatctcgctggactatgggatgc

SEQ ID NO: 1073809 - DNA, 33 bp, Homo sapien
cctgtgacagcagcccaaagtatggctgtatcc

SEQ ID NO: 1073810 - DNA, 33 bp, Homo sapien
cctgtgacagcagcccgaagtatggctgtatcc

SEQ ID NO: 1073811 - DNA, 33 bp, Homo sapien
ttctctgctttcaccactgatatgtgccagagg

SEQ ID NO: 1073812 - DNA, 33 bp, Homo sapien
ttctctgctttcaccattgatatgtgccagagg

SEQ ID NO: 1073813 - DNA, 33 bp, Homo sapien
tgcacgcgaaagctccagatagtcaaatagtac

SEQ ID NO: 1073814 - DNA, 33 bp, Homo sapien
tgcacgcgaaagctccggatagtcaaatagtac

SEQ ID NO: 1073815 - DNA, 33 bp, Homo sapien
ccccaaccaattttcccgagccttctctcctct

SEQ ID NO: 1073816 - DNA, 33 bp, Homo sapien
ccccaaccaattttcctgagccttctctcctct

SEQ ID NO: 1073817 - DNA, 33 bp, Homo sapien
gcccaagccttctctacgatgctccagtgatcc

SEQ ID NO: 1073818 - DNA, 33 bp, Homo sapien
gcccaagccttctctaggatgctccagtgatcc

SEQ ID NO: 1073819 - DNA, 33 bp, Homo sapien
ggcaggtaccatctaactaccgctggtgcagct

SEQ ID NO: 1073820 - DNA, 33 bp, Homo sapien
ggcaggtaccatctaattaccgctggtgcagct

SEQ ID NO: 1073821 - DNA, 33 bp, Homo sapien
ccctgcctaaatgttcacaagcccattcctatt

SEQ ID NO: 1073822 - DNA, 33 bp, Homo sapien
ccctgcctaaatgttcgcaagcccattcctatt

SEQ ID NO: 1073823 - DNA, 33 bp, Homo sapien
aatggaagtcccagaaaaggagtgaaagaaaga

SEQ ID NO: 1073824 - DNA, 33 bp, Homo sapien
aatggaagtcccagaagaggagtgaaagaaaga

SEQ ID NO: 1073825 - DNA, 33 bp, Homo sapien
caccttacacctgtgaagatagttattctcaaa

SEQ ID NO: 1073826 - DNA, 33 bp, Homo sapien
caccttacacctgtgaggatagttattctcaaa

SEQ ID NO: 1073827 - DNA, 33 bp, Homo sapien
tgactgcaccaatgtacctttctaccaacagtg

SEQ ID NO: 1073828 - DNA, 33 bp, Homo sapien
tgactgcaccaatgtatctttctaccaacagtg

SEQ ID NO: 1073829 - DNA, 33 bp, Homo sapien
tcagattaccatgactaaaaagaaacaggttcc

SEQ ID NO: 1073830 - DNA, 33 bp, Homo sapien
tcagattaccatgactgaaaagaaacaggttcc

SEQ ID NO: 1073831 - DNA, 33 bp, Homo sapien
tgcctaacataaaacccacctagtcatggtgaa

SEQ ID NO: 1073832 - DNA, 33 bp, Homo sapien
tgcctaacataaaacctacctagtcatggtgaa

SEQ ID NO: 1073833 - DNA, 33 bp, Homo sapien
atgttgtgtattcatgcattggaccatatttcc

SEQ ID NO: 1073834 - DNA, 33 bp, Homo sapien
atgttgtgtattcatgtattggaccatatttcc

SEQ ID NO: 1073835 - DNA, 33 bp, Homo sapien
aattttatgagattaacgtaacctctttttgag

SEQ ID NO: 1073836 - DNA, 33 bp, Homo sapien
aattttatgagattaatgtaacctctttttgag

SEQ ID NO: 1073837 - DNA, 33 bp, Homo sapien
gacaaagctgtctacaatggtctgggcagctcc

SEQ ID NO: 1073838 - DNA, 33 bp, Homo sapien
gacaaagctgtctacattggtctgggcagctcc

SEQ ID NO: 1073839 - DNA, 33 bp, Homo sapien
gagaaaccttgtggaaacagcagtccttgcaga

SEQ ID NO: 1073840 - DNA, 33 bp, Homo sapien
gagaaaccttgtggaagcagcagtccttgcaga

SEQ ID NO: 1073841 - DNA, 33 bp, Homo sapien
cttccttgtggctagacagcaggcatatgactt

SEQ ID NO: 1073842 - DNA, 33 bp, Homo sapien
cttccttgtggctagagagcaggcatatgactt

SEQ ID NO: 1073843 - DNA, 33 bp, Homo sapien
gaattcaactccctaacaaaacccacaccacag

SEQ ID NO: 1073844 - DNA, 33 bp, Homo sapien
gaattcaactccctaataaaacccacaccacag

SEQ ID NO: 1073845 - DNA, 33 bp, Homo sapien
taaatatggatgaaccacaatgaaatactactt

SEQ ID NO: 1073846 - DNA, 33 bp, Homo sapien
taaatatggatgaaccgcaatgaaatactactt

SEQ ID NO: 1073847 - DNA, 33 bp, Homo sapien
ttagatcatttttatcactctcaaaagaaaccc

SEQ ID NO: 1073848 - DNA, 33 bp, Homo sapien
ttagatcatttttatcgctctcaaaagaaaccc

SEQ ID NO: 1073849 - DNA, 33 bp, Homo sapien
tatcttctaaccataccgatgattctccgtata

SEQ ID NO: 1073850 - DNA, 33 bp, Homo sapien
tatcttctaaccatactgatgattctccgtata

SEQ ID NO: 1073851 - DNA, 33 bp, Homo sapien
attgtagggccataaagttctttagacagtggt

SEQ ID NO: 1073852 - DNA, 33 bp, Homo sapien
attgtagggccataaatttctttagacagtggt

SEQ ID NO: 1073853 - DNA, 33 bp, Homo sapien
ttcagagatttccaacagtgttcaagggactgc

SEQ ID NO: 1073854 - DNA, 33 bp, Homo sapien
ttcagagatttccaaccgtgttcaagggactgc

SEQ ID NO: 1073855 - DNA, 33 bp, Homo sapien
ctggataaattaatgcccagaaaaggtgccctg

SEQ ID NO: 1073856 - DNA, 33 bp, Homo sapien
ctggataaattaatgctcagaaaaggtgccctg

SEQ ID NO: 1073857 - DNA, 33 bp, Homo sapien
gcttctccaaataaacaaggacaatggggacca

SEQ ID NO: 1073858 - DNA, 33 bp, Homo sapien
gcttctccaaataaacgaggacaatggggacca

SEQ ID NO: 1073859 - DNA, 33 bp, Homo sapien
atctgctgtatttgtcacatgatgtcacaaagg

SEQ ID NO: 1073860 - DNA, 33 bp, Homo sapien
atctgctgtatttgtcgcatgatgtcacaaagg

SEQ ID NO: 1073861 - DNA, 33 bp, Homo sapien
gaagagaccaaagcagaaaggagatggggggat

SEQ ID NO: 1073862 - DNA, 33 bp, Homo sapien
gaagagaccaaagcaggaaggagatggggggat

SEQ ID NO: 1073863 - DNA, 33 bp, Homo sapien
gaacacaagctgaaaacttcctttaaaatccct

SEQ ID NO: 1073864 - DNA, 33 bp, Homo sapien
gaacacaagctgaaaatttcctttaaaatccct

SEQ ID NO: 1073865 - DNA, 33 bp, Homo sapien
tgcaatagaccactaaacttccttcatgtccct

SEQ ID NO: 1073866 - DNA, 33 bp, Homo sapien
tgcaatagaccactaagcttccttcatgtccct

SEQ ID NO: 1073867 - DNA, 33 bp, Homo sapien
ggcagagaagggaaagactctcgcaggtcccag

SEQ ID NO: 1073868 - DNA, 33 bp, Homo sapien
ggcagagaagggaaagcctctcgcaggtcccag

SEQ ID NO: 1073869 - DNA, 33 bp, Homo sapien
gcatctaaagcacctaacataggttacagcaca

SEQ ID NO: 1073870 - DNA, 33 bp, Homo sapien
gcatctaaagcacctagcataggttacagcaca

SEQ ID NO: 1073871 - DNA, 33 bp, Homo sapien
gagcaccagtagcataaagggttgggcttccag

SEQ ID NO: 1073872 - DNA, 33 bp, Homo sapien
gagcaccagtagcatacagggttgggcttccag

SEQ ID NO: 1073873 - DNA, 33 bp, Homo sapien
ttataatcgtgcacagaaccattatctggaggc

SEQ ID NO: 1073874 - DNA, 33 bp, Homo sapien
ttataatcgtgcacaggaccattatctggaggc

SEQ ID NO: 1073875 - DNA, 33 bp, Homo sapien
tcagccccttctaacaatcctggaagatcctgg

SEQ ID NO: 1073876 - DNA, 33 bp, Homo sapien
tcagccccttctaacagtcctggaagatcctgg

SEQ ID NO: 1073877 - DNA, 33 bp, Homo sapien
tggagaatctaacaaaagcctacttacacttgt

SEQ ID NO: 1073878 - DNA, 33 bp, Homo sapien
tggagaatctaacaaaggcctacttacacttgt

SEQ ID NO: 1073879 - DNA, 33 bp, Homo sapien
atgtcaaaaagactcaagggcatcatggacctt

SEQ ID NO: 1073880 - DNA, 33 bp, Homo sapien
atgtcaaaaagactcaggggcatcatggacctt

SEQ ID NO: 1073881 - DNA, 33 bp, Homo sapien
aataagttgtgccatagcaaattccagaacatt

SEQ ID NO: 1073882 - DNA, 33 bp, Homo sapien
aataagttgtgccatatcaaattccagaacatt

SEQ ID NO: 1073883 - DNA, 33 bp, Homo sapien
ctgtgctgtgtggtgacggtttcgaaccccact

SEQ ID NO: 1073884 - DNA, 33 bp, Homo sapien
ctgtgctgtgtggtgatggtttcgaaccccact

SEQ ID NO: 1073885 - DNA, 33 bp, Homo sapien
gtcacaaatctcaataagctggccttgactcta

SEQ ID NO: 1073886 - DNA, 33 bp, Homo sapien
gtcacaaatctcaataggctggccttgactcta

SEQ ID NO: 1073887 - DNA, 33 bp, Homo sapien
ttaaaagccttctgtacgaaactttgtctgtga

SEQ ID NO: 1073888 - DNA, 33 bp, Homo sapien
ttaaaagccttctgtaggaaactttgtctgtga

SEQ ID NO: 1073889 - DNA, 33 bp, Homo sapien
aaattgcacttcagataagctagttagaatgtc

SEQ ID NO: 1073890 - DNA, 33 bp, Homo sapien
aaattgcacttcagatgagctagttagaatgtc

SEQ ID NO: 1073891 - DNA, 33 bp, Homo sapien
cccatgcttcacggacaaagaatctgaggctca

SEQ ID NO: 1073892 - DNA, 33 bp, Homo sapien
cccatgcttcacggacgaagaatctgaggctca

SEQ ID NO: 1073893 - DNA, 33 bp, Homo sapien
aggccaaaaggccttaagaaagcacaccaggca

SEQ ID NO: 1073894 - DNA, 33 bp, Homo sapien
aggccaaaaggccttaggaaagcacaccaggca

SEQ ID NO: 1073895 - DNA, 33 bp, Homo sapien
tatttttgaaactatgaaaagcttacttataaa

SEQ ID NO: 1073896 - DNA, 33 bp, Homo sapien
tatttttgaaactatggaaagcttacttataaa

SEQ ID NO: 1073897 - DNA, 33 bp, Homo sapien
tagccagacccaaagaatatcagctcaataatt

SEQ ID NO: 1073898 - DNA, 33 bp, Homo sapien
tagccagacccaaagagtatcagctcaataatt

SEQ ID NO: 1073899 - DNA, 33 bp, Homo sapien
gccccatcacactcaacgcttcccagattgcct

SEQ ID NO: 1073900 - DNA, 33 bp, Homo sapien
gccccatcacactcaatgcttcccagattgcct

SEQ ID NO: 1073901 - DNA, 33 bp, Homo sapien; identical to SEQ ID NO: 1073899

SEQ ID NO: 1073902 - DNA, 33 bp, Homo sapien; identical to SEQ ID NO: 1073900

SEQ ID NO: 1073903 - DNA, 33 bp, Homo sapien
atatcattagccctcaagaaaatgcaaattaaa

SEQ ID NO: 1073904 - DNA, 33 bp, Homo sapien
atatcattagccctcaggaaaatgcaaattaaa

SEQ ID NO: 1073905 - DNA, 33 bp, Homo sapien
tttgaaaatacagatccatggaggatgagacaa

SEQ ID NO: 1073906 - DNA, 33 bp, Homo sapien
tttgaaaatacagatctatggaggatgagacaa

SEQ ID NO: 1073907 - DNA, 33 bp, Homo sapien
cacattatgattaactaaagtccgtacatttgg

SEQ ID NO: 1073908 - DNA, 33 bp, Homo sapien
cacattatgattaactgaagtccgtacatttgg

SEQ ID NO: 1073909 - DNA, 33 bp, Homo sapien
tttggctttagggaatgaaattatttctggctg

SEQ ID NO: 1073910 - DNA, 33 bp, Homo sapien
tttggctttagggaattaaattatttctggctg

SEQ ID NO: 1073911 - DNA, 33 bp, Homo sapien
tcaggtgaacatttaccaagcatctactaagtg

SEQ ID NO: 1073912 - DNA, 33 bp, Homo sapien
tcaggtgaacatttactaagcatctactaagtg

SEQ ID NO: 1073913 - DNA, 33 bp, Homo sapien
ttgcgtagcaaagtaaatagggactgtaaatat

SEQ ID NO: 1073914 - DNA, 33 bp, Homo sapien
ttgcgtagcaaagtaagtagggactgtaaatat

SEQ ID NO: 1073915 - DNA, 33 bp, Homo sapien
ttgatgctgtcagagaaaacagggacctagtaa

SEQ ID NO: 1073916 - DNA, 33 bp, Homo sapien
ttgatgctgtcagagacaacagggacctagtaa

SEQ ID NO: 1073917 - DNA, 33 bp, Homo sapien
attgtcacaactttggaaatactctgtcatgtg

SEQ ID NO: 1073918 - DNA, 33 bp, Homo sapien
attgtcacaactttgggaatactctgtcatgtg

SEQ ID NO: 1073919 - DNA, 33 bp, Homo sapien
ccgacccagtttatgaagagccttgaatactag

SEQ ID NO: 1073920 - DNA, 33 bp, Homo sapien
ccgacccagtttatgaggagccttgaatactag

SEQ ID NO: 1073921 - DNA, 33 bp, Homo sapien
ctgtaaaaggggctaccgagaagaaccaagtgc

SEQ ID NO: 1073922 - DNA, 33 bp, Homo sapien
ctgtaaaaggggctactgagaagaaccaagtgc

SEQ ID NO: 1073923 - DNA, 33 bp, Homo sapien
aaactttaacattgacgggatatttgtagattt

SEQ ID NO: 1073924 - DNA, 33 bp, Homo sapien
aaactttaacattgactggatatttgtagattt

SEQ ID NO: 1073925 - DNA, 33 bp, Homo sapien
ttttctcatatatctgcaatgcttacccacaaa

SEQ ID NO: 1073926 - DNA, 33 bp, Homo sapien
ttttctcatatatctgtaatgcttacccacaaa

SEQ ID NO: 1073927 - DNA, 33 bp, Homo sapien
acctgaaagctctgcaactctggatgtttctat

SEQ ID NO: 1073928 - DNA, 33 bp, Homo sapien
acctgaaagctctgcagctctggatgtttctat

SEQ ID NO: 1073929 - DNA, 33 bp, Homo sapien
aaactacaagatcctcaaatttttttttattat

SEQ ID NO: 1073930 - DNA, 33 bp, Homo sapien
aaactacaagatcctccaatttttttttattat

SEQ ID NO: 1073931 - DNA, 33 bp, Homo sapien
aaagaaatcttatctcccaggaggacttagggc

SEQ ID NO: 1073932 - DNA, 33 bp, Homo sapien
aaagaaatcttatctctcaggaggacttagggc

SEQ ID NO: 1073933 - DNA, 33 bp, Homo sapien
caacacagcagcatataagaaggctcttttctt

SEQ ID NO: 1073934 - DNA, 33 bp, Homo sapien
caacacagcagcatattagaaggctcttttctt

SEQ ID NO: 1073935 - DNA, 33 bp, Homo sapien
accttatccatttcaaaagcttcatgaatagcc

SEQ ID NO: 1073936 - DNA, 33 bp, Homo sapien
accttatccatttcaagagcttcatgaatagcc

SEQ ID NO: 1073937 - DNA, 33 bp, Homo sapien
cccagcaattctatgacctacccagtacccttc

SEQ ID NO: 1073938 - DNA, 33 bp, Homo sapien
cccagcaattctatgagctacccagtacccttc

SEQ ID NO: 1073939 - DNA, 33 bp, Homo sapien
ttcttttttaagctacagcacagtacatggctg

SEQ ID NO: 1073940 - DNA, 33 bp, Homo sapien
ttcttttttaagctacggcacagtacatggctg

SEQ ID NO: 1073941 - DNA, 33 bp, Homo sapien
gcacatacagacagaacacgatcctttgtttcc

SEQ ID NO: 1073942 - DNA, 33 bp, Homo sapien
gcacatacagacagaatacgatcctttgtttcc

SEQ ID NO: 1073943 - DNA, 33 bp, Homo sapien
tcagtggaaagaaagacgcagtcataatgagcc

SEQ ID NO: 1073944 - DNA, 33 bp, Homo sapien
tcagtggaaagaaagatgcagtcataatgagcc

SEQ ID NO: 1073945 - DNA, 33 bp, Homo sapien
acctgggggtgagatcactgggaccaaaataca

SEQ ID NO: 1073946 - DNA, 33 bp, Homo sapien
acctgggggtgagatcgctgggaccaaaataca

SEQ ID NO: 1073947 - DNA, 33 bp, Homo sapien
agctttgagagaggaaaggagcatagaaggaaa

SEQ ID NO: 1073948 - DNA, 33 bp, Homo sapien
agctttgagagaggaagggagcatagaaggaaa

SEQ ID NO: 1073949 - DNA, 33 bp, Homo sapien
agagaagagtgcagtacgaaggatggcatccct

SEQ ID NO: 1073950 - DNA, 33 bp, Homo sapien
agagaagagtgcagtatgaaggatggcatccct

SEQ ID NO: 1073951 - DNA, 33 bp, Homo sapien
cagggctgtgtttccacaggacaaaactgcaaa

SEQ ID NO: 1073952 - DNA, 33 bp, Homo sapien
cagggctgtgtttccataggacaaaactgcaaa

SEQ ID NO: 1073953 - DNA, 33 bp, Homo sapien
acttgctttttgtcagaattttggagtatccta

SEQ ID NO: 1073954 - DNA, 33 bp, Homo sapien
acttgctttttgtcaggattttggagtatccta

SEQ ID NO: 1073955 - DNA, 33 bp, Homo sapien
ggattttgtagaataacagtgagactccattgg

SEQ ID NO: 1073956 - DNA, 33 bp, Homo sapien
ggattttgtagaataatagtgagactccattgg

SEQ ID NO: 1073957 - DNA, 33 bp, Homo sapien
caaaccagtgatttccaaccaggagaccagtcc

SEQ ID NO: 1073958 - DNA, 33 bp, Homo sapien
caaaccagtgatttccgaccaggagaccagtcc

SEQ ID NO: 1073959 - DNA, 33 bp, Homo sapien
aagaaagacaggagaccgtacgagacacagaga

SEQ ID NO: 1073960 - DNA, 33 bp, Homo sapien
aagaaagacaggagactgtacgagacacagaga

SEQ ID NO: 1073961 - DNA, 33 bp, Homo sapien
atatctctgagatgaactagtactttctgaaat

SEQ ID NO: 1073962 - DNA, 33 bp, Homo sapien
atatctctgagatgaagtagtactttctgaaat

SEQ ID NO: 1073963 - DNA, 33 bp, Homo sapien
tctatgaagaagccaaatgacaagagtacaata

SEQ ID NO: 1073964 - DNA, 33 bp, Homo sapien
tctatgaagaagccaattgacaagagtacaata

SEQ ID NO: 1073965 - DNA, 33 bp, Homo sapien
actactcctgtattgcactacaccactatcaga

SEQ ID NO: 1073966 - DNA, 33 bp, Homo sapien
actactcctgtattgcgctacaccactatcaga

SEQ ID NO: 1073967 - DNA, 33 bp, Homo sapien
cgctttttagagaacacctgtgcaagactcagc

SEQ ID NO: 1073968 - DNA, 33 bp, Homo sapien
cgctttttagagaacatctgtgcaagactcagc

SEQ ID NO: 1073969 - DNA, 33 bp, Homo sapien
actcctagatatatgcccaagaggattgaaaac

SEQ ID NO: 1073970 - DNA, 33 bp, Homo sapien
actcctagatatatgcgcaagaggattgaaaac

SEQ ID NO: 1073971 - DNA, 33 bp, Homo sapien
gaacaagagaaccagtcaagctgaatgcctgaa

SEQ ID NO: 1073972 - DNA, 33 bp, Homo sapien
gaacaagagaaccagttaagctgaatgcctgaa

SEQ ID NO: 1073973 - DNA, 33 bp, Homo sapien
ctcatgcaagttatcaataagtggcagggacag

SEQ ID NO: 1073974 - DNA, 33 bp, Homo sapien
ctcatgcaagttatcagtaagtggcagggacag

SEQ ID NO: 1073975 - DNA, 33 bp, Homo sapien
taggtgctatggccaaacttgaggctgccatgt

SEQ ID NO: 1073976 - DNA, 33 bp, Homo sapien
taggtgctatggccaaccttgaggctgccatgt

SEQ ID NO: 1073977 - DNA, 33 bp, Homo sapien
ctccttgcacactataagctttgtaggcaaatg

SEQ ID NO: 1073978 - DNA, 33 bp, Homo sapien
ctccttgcacactataggctttgtaggcaaatg

SEQ ID NO: 1073979 - DNA, 33 bp, Homo sapien
gccttccccgaatgaacccagaggtaattctgg

SEQ ID NO: 1073980 - DNA, 33 bp, Homo sapien
gccttccccgaatgaatccagaggtaattctgg

SEQ ID NO: 1073981 - DNA, 33 bp, Homo sapien
ggcactcaggactccaaagttcagcccaggtaa

SEQ ID NO: 1073982 - DNA, 33 bp, Homo sapien
ggcactcaggactccagagttcagcccaggtaa

SEQ ID NO: 1073983 - DNA, 33 bp, Homo sapien
agaccttcagatccaaatcttggtgttaccaac

SEQ ID NO: 1073984 - DNA, 33 bp, Homo sapien
agaccttcagatccaagtcttggtgttaccaac

SEQ ID NO: 1073985 - DNA, 33 bp, Homo sapien
gaaggtctagaaaagcacaacatcctgagactc

SEQ ID NO: 1073986 - DNA, 33 bp, Homo sapien
gaaggtctagaaaagcgcaacatcctgagactc

SEQ ID NO: 1073987 - DNA, 33 bp, Homo sapien
tccttcctcacctctgaattattctgcctcttt

SEQ ID NO: 1073988 - DNA, 33 bp, Homo sapien
tccttcctcacctctggattattctgcctcttt

SEQ ID NO: 1073989 - DNA, 33 bp, Homo sapien
caaaggagtatgtgcaagaatgatcaaaataag

SEQ ID NO: 1073990 - DNA, 33 bp, Homo sapien
caaaggagtatgtgcaggaatgatcaaaataag

SEQ ID NO: 1073991 - DNA, 33 bp, Homo sapien
cagcatcaacacgggaactctttcactagcagg

SEQ ID NO: 1073992 - DNA, 33 bp, Homo sapien
cagcatcaacacgggagctctttcactagcagg

SEQ ID NO: 1073993 - DNA, 33 bp, Homo sapien
tgttattcagcatccacgtaactcctagaagtt

SEQ ID NO: 1073994 - DNA, 33 bp, Homo sapien
tgttattcagcatccatgtaactcctagaagtt

SEQ ID NO: 1073995 - DNA, 33 bp, Homo sapien
aagggaagagtcccagaccattagtagatgaag

SEQ ID NO: 1073996 - DNA, 33 bp, Homo sapien
aagggaagagtcccaggccattagtagatgaag

SEQ ID NO: 1073997 - DNA, 33 bp, Homo sapien
aggcactgagtgaaacactgtaaatgtttacta

SEQ ID NO: 1073998 - DNA, 33 bp, Homo sapien
aggcactgagtgaaacgctgtaaatgtttacta

SEQ ID NO: 1073999 - DNA, 33 bp, Homo sapien
cccaccaacctcattacccagcattgctgacaa

SEQ ID NO: 1074000 - DNA, 33 bp, Homo sapien
cccaccaacctcattatccagcattgctgacaa

SEQ ID NO: 1074001 - DNA, 33 bp, Homo sapien
cgtgacattatggaacacaaaacctggctgctg

SEQ ID NO: 1074002 - DNA, 33 bp, Homo sapien
cgtgacattatggaacgcaaaacctggctgctg

SEQ ID NO: 1074003 - DNA, 33 bp, Homo sapien
aatatcttgcaagtcacaggaagctaccaggga

SEQ ID NO: 1074004 - DNA, 33 bp, Homo sapien
aatatcttgcaagtcataggaagctaccaggga

SEQ ID NO: 1074005 - DNA, 33 bp, Homo sapien
agctgctctcctatagcacatggcgggaggcgt

SEQ ID NO: 1074006 - DNA, 33 bp, Homo sapien
agctgctctcctatagtacatggcgggaggcgt

SEQ ID NO: 1074007 - DNA, 33 bp, Homo sapien
ttcatacaatgtaaaactactcatcaataaaaa

SEQ ID NO: 1074008 - DNA, 33 bp, Homo sapien
ttcatacaatgtaaaagtactcatcaataaaaa

SEQ ID NO: 1074009 - DNA, 33 bp, Homo sapien
gttcacattatggagcaaccacttgttagctgt

SEQ ID NO: 1074010 - DNA, 33 bp, Homo sapien
gttcacattatggagccaccacttgttagctgt

SEQ ID NO: 1074011 - DNA, 33 bp, Homo sapien
cctgttttgcttcttacccaagagatgatctca

SEQ ID NO: 1074012 - DNA, 33 bp, Homo sapien
cctgttttgcttcttatccaagagatgatctca

SEQ ID NO: 1074013 - DNA, 33 bp, Homo sapien
atatcacggatgatgaagcctgccttagagata

SEQ ID NO: 1074014 - DNA, 33 bp, Homo sapien
atatcacggatgatgacgcctgccttagagata

SEQ ID NO: 1074015 - DNA, 33 bp, Homo sapien
ccacaggctgtgtcccgagaaagtagcttgtgt

SEQ ID NO: 1074016 - DNA, 33 bp, Homo sapien
ccacaggctgtgtccctagaaagtagcttgtgt

SEQ ID NO: 1074017 - DNA, 33 bp, Homo sapien
tgatagtgtcgcacagcaggctcatgtctccct

SEQ ID NO: 1074018 - DNA, 33 bp, Homo sapien
tgatagtgtcgcacagtaggctcatgtctccct

SEQ ID NO: 1074019 - DNA, 33 bp, Homo sapien
tatgggaaaataagataagttccatgctcgaga

SEQ ID NO: 1074020 - DNA, 33 bp, Homo sapien
tatgggaaaataagatgagttccatgctcgaga

SEQ ID NO: 1074021 - DNA, 33 bp, Homo sapien
agagctctacaaccatcactgctatctatgtcc

SEQ ID NO: 1074022 - DNA, 33 bp, Homo sapien
agagctctacaaccattactgctatctatgtcc

SEQ ID NO: 1074023 - DNA, 33 bp, Homo sapien
aggccatatgacagaccccggtaaagacacctg

SEQ ID NO: 1074024 - DNA, 33 bp, Homo sapien
aggccatatgacagactccggtaaagacacctg

SEQ ID NO: 1074025 - DNA, 33 bp, Homo sapien
gacaaaatggctgcacaagaagtccacaggtga

SEQ ID NO: 1074026 - DNA, 33 bp, Homo sapien
gacaaaatggctgcacgagaagtccacaggtga

SEQ ID NO: 1074027 - DNA, 33 bp, Homo sapien
ctatcttttagagaaaagccaaacaacaaattt

SEQ ID NO: 1074028 - DNA, 33 bp, Homo sapien
ctatcttttagagaaaggccaaacaacaaattt

SEQ ID NO: 1074029 - DNA, 33 bp, Homo sapien
aataaccatgatacaaccgcatttctctcttga

SEQ ID NO: 1074030 - DNA, 33 bp, Homo sapien
aataaccatgatacaatcgcatttctctcttga

SEQ ID NO: 1074031 - DNA, 33 bp, Homo sapien
acctcagaagtccttcactggaaattaaatcca

SEQ ID NO: 1074032 - DNA, 33 bp, Homo sapien
acctcagaagtccttcgctggaaattaaatcca

SEQ ID NO: 1074033 - DNA, 33 bp, Homo sapien
aaaagatggaaagaaaaacatggaaaaccattt

SEQ ID NO: 1074034 - DNA, 33 bp, Homo sapien
aaaagatggaaagaaagacatggaaaaccattt

SEQ ID NO: 1074035 - DNA, 33 bp, Homo sapien
gtataaatgatcctatcaatggagaattaacat

SEQ ID NO: 1074036 - DNA, 33 bp, Homo sapien
gtataaatgatcctatgaatggagaattaacat

SEQ ID NO: 1074037 - DNA, 33 bp, Homo sapien
ttttcagagggacactcaaatgaagtacacaca

SEQ ID NO: 1074038 - DNA, 33 bp, Homo sapien
ttttcagagggacactgaaatgaagtacacaca

SEQ ID NO: 1074039 - DNA, 33 bp, Homo sapien
gctgacctagctaagcaatgcactgaggcttta

SEQ ID NO: 1074040 - DNA, 33 bp, Homo sapien
gctgacctagctaagcgatgcactgaggcttta

SEQ ID NO: 1074041 - DNA, 33 bp, Homo sapien
gtcagttagcaaaaaccacaaaatgcagataca

SEQ ID NO: 1074042 - DNA, 33 bp, Homo sapien
gtcagttagcaaaaactacaaaatgcagataca

SEQ ID NO: 1074043 - DNA, 33 bp, Homo sapien
aattgaatatatcaaaatcaaatgcaaataaac

SEQ ID NO: 1074044 - DNA, 33 bp, Homo sapien
aattgaatatatcaaactcaaatgcaaataaac

SEQ ID NO: 1074045 - DNA, 33 bp, Homo sapien
cagacttctttgaaaacggtcaactttgtgtat

SEQ ID NO: 1074046 - DNA, 33 bp, Homo sapien
cagacttctttgaaaatggtcaactttgtgtat

SEQ ID NO: 1074047 - DNA, 33 bp, Homo sapien
ttcacagtgttgttttaaaaaagttattagcta

SEQ ID NO: 1074048 - DNA, 33 bp, Homo sapien
ttcacagtgttgtttttaaaaagttattagcta

SEQ ID NO: 1074049 - DNA, 33 bp, Homo sapien
attagctttgtttactcacagatgcaaatttat

SEQ ID NO: 1074050 - DNA, 33 bp, Homo sapien
attagctttgtttacttacagatgcaaatttat

SEQ ID NO: 1074051 - DNA, 33 bp, Homo sapien
cagatgctattaactcacttcactcacacaatg

SEQ ID NO: 1074052 - DNA, 33 bp, Homo sapien
cagatgctattaactcgcttcactcacacaatg

SEQ ID NO: 1074053 - DNA, 33 bp, Homo sapien
tgcattatgcaagtgacaagatactactcagct

SEQ ID NO: 1074054 - DNA, 33 bp, Homo sapien
tgcattatgcaagtgataagatactactcagct

SEQ ID NO: 1074055 - DNA, 33 bp, Homo sapien
agttcaaccatgtaacacttttctgcaaatatg

SEQ ID NO: 1074056 - DNA, 33 bp, Homo sapien
agttcaaccatgtaacgcttttctgcaaatatg

SEQ ID NO: 1074057 - DNA, 33 bp, Homo sapien
tgtgatacattgggcccatctgtatagcctaga

SEQ ID NO: 1074058 - DNA, 33 bp, Homo sapien
tgtgatacattgggcctatctgtatagcctaga

SEQ ID NO: 1074059 - DNA, 33 bp, Homo sapien
cagctgagactcatcaactgaaaaaggttactt

SEQ ID NO: 1074060 - DNA, 33 bp, Homo sapien
cagctgagactcatcagctgaaaaaggttactt

SEQ ID NO: 1074061 - DNA, 33 bp, Homo sapien
tcagcctcagtttggcagatgttttcttaagtc

SEQ ID NO: 1074062 - DNA, 33 bp, Homo sapien
tcagcctcagtttggccgatgttttcttaagtc

SEQ ID NO: 1074063 - DNA, 33 bp, Homo sapien
acactgccttgaagtacgctaaactataccaac

SEQ ID NO: 1074064 - DNA, 33 bp, Homo sapien
acactgccttgaagtatgctaaactataccaac

SEQ ID NO: 1074065 - DNA, 33 bp, Homo sapien
ttttattgatcttctcaaagagtcagcttttgg

SEQ ID NO: 1074066 - DNA, 33 bp, Homo sapien
ttttattgatcttctccaagagtcagcttttgg

SEQ ID NO: 1074067 - DNA, 33 bp, Homo sapien
atactaacctctaacaacttatcactgtgccct

SEQ ID NO: 1074068 - DNA, 33 bp, Homo sapien
atactaacctctaacagcttatcactgtgccct

SEQ ID NO: 1074069 - DNA, 33 bp, Homo sapien
ttttaagactacgttcagaacaatgtggatggt

SEQ ID NO: 1074070 - DNA, 33 bp, Homo sapien
ttttaagactacgttcggaacaatgtggatggt

SEQ ID NO: 1074071 - DNA, 33 bp, Homo sapien
acatgtttcaaaattgcagaaccgatcaagtca

SEQ ID NO: 1074072 - DNA, 33 bp, Homo sapien
acatgtttcaaaattgtagaaccgatcaagtca

SEQ ID NO: 1074073 - DNA, 33 bp, Homo sapien
tgaaatccttgcactacccatcttcctgctttc

SEQ ID NO: 1074074 - DNA, 33 bp, Homo sapien
tgaaatccttgcactatccatcttcctgctttc

SEQ ID NO: 1074075 - DNA, 33 bp, Homo sapien
tgtttggcactgttaacgtgcagcatcttgttt

SEQ ID NO: 1074076 - DNA, 33 bp, Homo sapien
tgtttggcactgttaatgtgcagcatcttgttt

SEQ ID NO: 1074077 - DNA, 33 bp, Homo sapien
gacagagctaggttgcagaaaggctactgctat

SEQ ID NO: 1074078 - DNA, 33 bp, Homo sapien
gacagagctaggttgcggaaaggctactgctat

SEQ ID NO: 1074079 - DNA, 33 bp, Homo sapien
aactcatctccggtgcagaaatgattgctaaag

SEQ ID NO: 1074080 - DNA, 33 bp, Homo sapien
aactcatctccggtgcggaaatgattgctaaag

SEQ ID NO: 1074081 - DNA, 33 bp, Homo sapien
ctttctcatgtcaacccgaaggccacacccagc

SEQ ID NO: 1074082 - DNA, 33 bp, Homo sapien
ctttctcatgtcaaccggaaggccacacccagc

SEQ ID NO: 1074083 - DNA, 33 bp, Homo sapien
cacatagattcagctacattttggagtgtattt

SEQ ID NO: 1074084 - DNA, 33 bp, Homo sapien
cacatagattcagctatattttggagtgtattt

SEQ ID NO: 1074085 - DNA, 33 bp, Homo sapien
gagcaaaggtaaaacaccacatttcaataaatt

SEQ ID NO: 1074086 - DNA, 33 bp, Homo sapien
gagcaaaggtaaaacatcacatttcaataaatt

SEQ ID NO: 1074087 - DNA, 33 bp, Homo sapien
cctacaggtgtcaggagaacatggaacatttaa

SEQ ID NO: 1074088 - DNA, 33 bp, Homo sapien
cctacaggtgtcaggataacatggaacatttaa

SEQ ID NO: 1074089 - DNA, 33 bp, Homo sapien
agagagttcatgtgtacacttcacctagcttct

SEQ ID NO: 1074090 - DNA, 33 bp, Homo sapien
agagagttcatgtgtatacttcacctagcttct

SEQ ID NO: 1074091 - DNA, 33 bp, Homo sapien
agggacttctctttaacaggtaagcacagtgca

SEQ ID NO: 1074092 - DNA, 33 bp, Homo sapien
agggacttctctttaagaggtaagcacagtgca

SEQ ID NO: 1074093 - DNA, 33 bp, Homo sapien
gagcaagctgtttcccagcagtatgacgcacat

SEQ ID NO: 1074094 - DNA, 33 bp, Homo sapien
gagcaagctgtttcccggcagtatgacgcacat

SEQ ID NO: 1074095 - DNA, 33 bp, Homo sapien
ctcttgaataagtgaaaccttgaaagctgagtg

SEQ ID NO: 1074096 - DNA, 33 bp, Homo sapien
ctcttgaataagtgaagccttgaaagctgagtg

SEQ ID NO: 1074097 - DNA, 33 bp, Homo sapien
aatgattgaaacttccagatttagtgatttaat

SEQ ID NO: 1074098 - DNA, 33 bp, Homo sapien
aatgattgaaacttccggatttagtgatttaat

SEQ ID NO: 1074099 - DNA, 33 bp, Homo sapien
ctacccacactgcagcaaatgttactcctgttc

SEQ ID NO: 1074100 - DNA, 33 bp, Homo sapien
ctacccacactgcagcgaatgttactcctgttc

SEQ ID NO: 1074101 - DNA, 33 bp, Homo sapien
agccagaccagtggggaaagaaggaaagacggt

SEQ ID NO: 1074102 - DNA, 33 bp, Homo sapien
agccagaccagtggggcaagaaggaaagacggt

SEQ ID NO: 1074103 - DNA, 33 bp, Homo sapien
gatctttccactgtaacgtgaattagcagggct

SEQ ID NO: 1074104 - DNA, 33 bp, Homo sapien
gatctttccactgtaatgtgaattagcagggct

SEQ ID NO: 1074105 - DNA, 33 bp, Homo sapien
tttaatgaggaacagaaatttatacaatcgcaa

SEQ ID NO: 1074106 - DNA, 33 bp, Homo sapien
tttaatgaggaacagatatttatacaatcgcaa

SEQ ID NO: 1074107 - DNA, 33 bp, Homo sapien
ttggtcaagtaactgacgccctttgggtctcat

SEQ ID NO: 1074108 - DNA, 33 bp, Homo sapien
ttggtcaagtaactgatgccctttgggtctcat

SEQ ID NO: 1074109 - DNA, 33 bp, Homo sapien
gaactatgaggaacccaatggggcattaaacaa

SEQ ID NO: 1074110 - DNA, 33 bp, Homo sapien
gaactatgaggaacccgatggggcattaaacaa

SEQ ID NO: 1074111 - DNA, 33 bp, Homo sapien
gaaagaaagcatgggaaaatttacagatgaggg

SEQ ID NO: 1074112 - DNA, 33 bp, Homo sapien
gaaagaaagcatgggagaatttacagatgaggg

SEQ ID NO: 1074113 - DNA, 33 bp, Homo sapien
ttggagacattataacaatctactgcacataca

SEQ ID NO: 1074114 - DNA, 33 bp, Homo sapien
ttggagacattataactatctactgcacataca

SEQ ID NO: 1074115 - DNA, 33 bp, Homo sapien
aacctagttttggatcagaagtcaatattgagg

SEQ ID NO: 1074116 - DNA, 33 bp, Homo sapien
aacctagttttggatcggaagtcaatattgagg

SEQ ID NO: 1074117 - DNA, 33 bp, Homo sapien
tctgtatttttgtctccccttgaataactatct

SEQ ID NO: 1074118 - DNA, 33 bp, Homo sapien
tctgtatttttgtctctccttgaataactatct

SEQ ID NO: 1074119 - DNA, 33 bp, Homo sapien
gtgtttatactttgtcgcagtaaaactatctct

SEQ ID NO: 1074120 - DNA, 33 bp, Homo sapien
gtgtttatactttgtctcagtaaaactatctct

SEQ ID NO: 1074121 - DNA, 33 bp, Homo sapien
catatggacagagggaaaaacaagcagagagga

SEQ ID NO: 1074122 - DNA, 33 bp, Homo sapien
catatggacagagggacaaacaagcagagagga

SEQ ID NO: 1074123 - DNA, 33 bp, Homo sapien
ataacaaaaatgccaaagaccaggcagcttaaa

SEQ ID NO: 1074124 - DNA, 33 bp, Homo sapien
ataacaaaaatgccaaggaccaggcagcttaaa

SEQ ID NO: 1074125 - DNA, 33 bp, Homo sapien
gcaaacagctcttcaacctacactgacttgagg

SEQ ID NO: 1074126 - DNA, 33 bp, Homo sapien
gcaaacagctcttcaatctacactgacttgagg

SEQ ID NO: 1074127 - DNA, 33 bp, Homo sapien
tagcctggtatgtttaaggaagagaaagatagt

SEQ ID NO: 1074128 - DNA, 33 bp, Homo sapien
tagcctggtatgtttagggaagagaaagatagt

SEQ ID NO: 1074129 - DNA, 33 bp, Homo sapien
cactggaatataccaaagacagtcctaatctta

SEQ ID NO: 1074130 - DNA, 33 bp, Homo sapien
cactggaatataccaaggacagtcctaatctta

SEQ ID NO: 1074131 - DNA, 33 bp, Homo sapien
aggaagtctttgagcacccctgtttccttatta

SEQ ID NO: 1074132 - DNA, 33 bp, Homo sapien
aggaagtctttgagcatccctgtttccttatta

SEQ ID NO: 1074133 - DNA, 33 bp, Homo sapien
tttttcagatgtcctgaatgggaagggaaaacc

SEQ ID NO: 1074134 - DNA, 33 bp, Homo sapien
tttttcagatgtcctgtatgggaagggaaaacc

SEQ ID NO: 1074135 - DNA, 33 bp, Homo sapien
agggataaaatgaggacataaatgcatgtagag

SEQ ID NO: 1074136 - DNA, 33 bp, Homo sapien
agggataaaatgaggatataaatgcatgtagag

SEQ ID NO: 1074137 - DNA, 33 bp, Homo sapien
gggacagattgtaaaactccagcagggaaaaga

SEQ ID NO: 1074138 - DNA, 33 bp, Homo sapien
gggacagattgtaaaattccagcagggaaaaga

SEQ ID NO: 1074139 - DNA, 33 bp, Homo sapien
tttctagcttactttccgaaacccaaatatttc

SEQ ID NO: 1074140 - DNA, 33 bp, Homo sapien
tttctagcttactttctgaaacccaaatatttc

SEQ ID NO: 1074141 - DNA, 33 bp, Homo sapien
ggatgttaaagataaccagagtacctggagaaa

SEQ ID NO: 1074142 - DNA, 33 bp, Homo sapien
ggatgttaaagataactagagtacctggagaaa

SEQ ID NO: 1074143 - DNA, 33 bp, Homo sapien
gtgcatgagagttacacatttcaagggattgta

SEQ ID NO: 1074144 - DNA, 33 bp, Homo sapien
gtgcatgagagttacatatttcaagggattgta

SEQ ID NO: 1074145 - DNA, 33 bp, Homo sapien
tatccagcaatgtgtcaatcacatgcaaaggaa

SEQ ID NO: 1074146 - DNA, 33 bp, Homo sapien
tatccagcaatgtgtcgatcacatgcaaaggaa

SEQ ID NO: 1074147 - DNA, 33 bp, Homo sapien
acagaaaggtatcttgcattcatggactggcag

SEQ ID NO: 1074148 - DNA, 33 bp, Homo sapien
acagaaaggtatcttgtattcatggactggcag

SEQ ID NO: 1074149 - DNA, 33 bp, Homo sapien
aaatatagatgaaaggaattaaagatgacacaa

SEQ ID NO: 1074150 - DNA, 33 bp, Homo sapien
aaatatagatgaaaggtattaaagatgacacaa

SEQ ID NO: 1074151 - DNA, 33 bp, Homo sapien
gcactgtattcggttacgcagtcctttcattcc

SEQ ID NO: 1074152 - DNA, 33 bp, Homo sapien
gcactgtattcggttatgcagtcctttcattcc

SEQ ID NO: 1074153 - DNA, 33 bp, Homo sapien
tatcttaacctaagagactcaagggctgaacat

SEQ ID NO: 1074154 - DNA, 33 bp, Homo sapien
tatcttaacctaagaggctcaagggctgaacat

SEQ ID NO: 1074155 - DNA, 33 bp, Homo sapien
caggaagttcatcaaaatcctctactaggaatg

SEQ ID NO: 1074156 - DNA, 33 bp, Homo sapien
caggaagttcatcaaagtcctctactaggaatg

SEQ ID NO: 1074157 - DNA, 33 bp, Homo sapien
tgatagcatcagatgacatacagggcctcgcag

SEQ ID NO: 1074158 - DNA, 33 bp, Homo sapien
tgatagcatcagatgatatacagggcctcgcag

SEQ ID NO: 1074159 - DNA, 33 bp, Homo sapien
cacttagtggctaatacgctatggccttgggaa

SEQ ID NO: 1074160 - DNA, 33 bp, Homo sapien
cacttagtggctaatatgctatggccttgggaa

SEQ ID NO: 1074161 - DNA, 33 bp, Homo sapien
aatgtgcttacagtaacggcagtgcagtggggt

SEQ ID NO: 1074162 - DNA, 33 bp, Homo sapien
aatgtgcttacagtaatggcagtgcagtggggt

SEQ ID NO: 1074163 - DNA, 33 bp, Homo sapien
tcctagcatttttcaaattcacatgacttgaat

SEQ ID NO: 1074164 - DNA, 33 bp, Homo sapien
tcctagcatttttcaagttcacatgacttgaat

SEQ ID NO: 1074165 - DNA, 33 bp, Homo sapien
caaataattgtagtcacacaataggtaattttt

SEQ ID NO: 1074166 - DNA, 33 bp, Homo sapien
caaataattgtagtcagacaataggtaattttt

SEQ ID NO: 1074167 - DNA, 33 bp, Homo sapien
ccccagagaagctttgaagcacatggaattgtt

SEQ ID NO: 1074168 - DNA, 33 bp, Homo sapien
ccccagagaagctttgtagcacatggaattgtt

SEQ ID NO: 1074169 - DNA, 33 bp, Homo sapien
caatatctgttaaagtcaatgactcatggcagg

SEQ ID NO: 1074170 - DNA, 33 bp, Homo sapien
caatatctgttaaagtgaatgactcatggcagg

SEQ ID NO: 1074171 - DNA, 33 bp, Homo sapien
agcctgcagttatagaaaatcgactttagtgtt

SEQ ID NO: 1074172 - DNA, 33 bp, Homo sapien
agcctgcagttatagagaatcgactttagtgtt

SEQ ID NO: 1074173 - DNA, 33 bp, Homo sapien
ccgtgcatttaacgaccgtcccttttattaatc

SEQ ID NO: 1074174 - DNA, 33 bp, Homo sapien
ccgtgcatttaacgactgtcccttttattaatc

SEQ ID NO: 1074175 - DNA, 33 bp, Homo sapien
tgggtccccgcttctcaaggaaactcaggacga

SEQ ID NO: 1074176 - DNA, 33 bp, Homo sapien
tgggtccccgcttctcgaggaaactcaggacga

SEQ ID NO: 1074177 - DNA, 33 bp, Homo sapien
caaactgaattcaaagcaatatacagtaggaca

SEQ ID NO: 1074178 - DNA, 33 bp, Homo sapien
caaactgaattcaaagtaatatacagtaggaca

SEQ ID NO: 1074179 - DNA, 33 bp, Homo sapien
aaataatgtatggataactgctatgatatgggt

SEQ ID NO: 1074180 - DNA, 33 bp, Homo sapien
aaataatgtatggatacctgctatgatatgggt

SEQ ID NO: 1074181 - DNA, 33 bp, Homo sapien
ggtgaaaagcagggacgcaagcagaaacttgta

SEQ ID NO: 1074182 - DNA, 33 bp, Homo sapien
ggtgaaaagcagggactcaagcagaaacttgta

SEQ ID NO: 1074183 - DNA, 33 bp, Homo sapien
ggcatagtgacagtcacaataacaattattaaa

SEQ ID NO: 1074184 - DNA, 33 bp, Homo sapien
ggcatagtgacagtcagaataacaattattaaa

SEQ ID NO: 1074185 - DNA, 33 bp, Homo sapien
caagaaacttatatgccgcaaaactattttaca

SEQ ID NO: 1074186 - DNA, 33 bp, Homo sapien
caagaaacttatatgctgcaaaactattttaca

SEQ ID NO: 1074187 - DNA, 33 bp, Homo sapien
tgaaaacacagaagtcaatttaattaaactaaa

SEQ ID NO: 1074188 - DNA, 33 bp, Homo sapien
tgaaaacacagaagtccatttaattaaactaaa

SEQ ID NO: 1074189 - DNA, 33 bp, Homo sapien
acacacttaggctaaaagtaatcagaagaaaaa

SEQ ID NO: 1074190 - DNA, 33 bp, Homo sapien
acacacttaggctaaaggtaatcagaagaaaaa

SEQ ID NO: 1074191 - DNA, 33 bp, Homo sapien
aaatattgtatcacctaagaaatgatttttgtt

SEQ ID NO: 1074192 - DNA, 33 bp, Homo sapien
aaatattgtatcacctcagaaatgatttttgtt

SEQ ID NO: 1074193 - DNA, 33 bp, Homo sapien
taagcaggatccccaccggattgtctccaactg

SEQ ID NO: 1074194 - DNA, 33 bp, Homo sapien
taagcaggatccccactggattgtctccaactg

SEQ ID NO: 1074195 - DNA, 33 bp, Homo sapien
tgactcacgagaccgactaacagtaattcacgt

SEQ ID NO: 1074196 - DNA, 33 bp, Homo sapien
tgactcacgagaccgattaacagtaattcacgt

SEQ ID NO: 1074197 - DNA, 33 bp, Homo sapien
cctatgactgcgaatacgtctacaatagctccc

SEQ ID NO: 1074198 - DNA, 33 bp, Homo sapien
cctatgactgcgaatatgtctacaatagctccc

SEQ ID NO: 1074199 - DNA, 33 bp, Homo sapien
cttatgtactacctgacctcctcaacttccagc

SEQ ID NO: 1074200 - DNA, 33 bp, Homo sapien
cttatgtactacctgatctcctcaacttccagc

SEQ ID NO: 1074201 - DNA, 33 bp, Homo sapien
ttagtctgcggcaagaagaaccctgctctggcc

SEQ ID NO: 1074202 - DNA, 33 bp, Homo sapien
ttagtctgcggcaagaggaaccctgctctggcc

SEQ ID NO: 1074203 - DNA, 33 bp, Homo sapien
ctgttggtgatgaaaaacaatgatctcaaaagc

SEQ ID NO: 1074204 - DNA, 33 bp, Homo sapien
ctgttggtgatgaaaaccaatgatctcaaaagc

SEQ ID NO: 1074205 - DNA, 33 bp, Homo sapien
ctggtggtggtgtgtaaaatgtaagggtccagt

SEQ ID NO: 1074206 - DNA, 33 bp, Homo sapien
ctggtggtggtgtgtagaatgtaagggtccagt

SEQ ID NO: 1074207 - DNA, 33 bp, Homo sapien
ttctctactacctcaactccagttcctcagtcc

SEQ ID NO: 1074208 - DNA, 33 bp, Homo sapien
ttctctactacctcaattccagttcctcagtcc

SEQ ID NO: 1074209 - DNA, 33 bp, Homo sapien
ctcatttcgcttaacacaacatcttccagttcc

SEQ ID NO: 1074210 - DNA, 33 bp, Homo sapien
ctcatttcgcttaacataacatcttccagttcc

SEQ ID NO: 1074211 - DNA, 33 bp, Homo sapien
acttgttcccagaacaccttgtgtaatatgaag

SEQ ID NO: 1074212 - DNA, 33 bp, Homo sapien
acttgttcccagaacatcttgtgtaatatgaag

SEQ ID NO: 1074213 - DNA, 33 bp, Homo sapien
ttttaagtctgagtaactctgttgaaatctaat

SEQ ID NO: 1074214 - DNA, 33 bp, Homo sapien
ttttaagtctgagtaattctgttgaaatctaat

SEQ ID NO: 1074215 - DNA, 33 bp, Homo sapien
aaagtattcaaatgtaaggtatgacttctctaa

SEQ ID NO: 1074216 - DNA, 33 bp, Homo sapien
aaagtattcaaatgtagggtatgacttctctaa

SEQ ID NO: 1074217 - DNA, 33 bp, Homo sapien
gagagtagtgaggggacgactgcaatggtttag

SEQ ID NO: 1074218 - DNA, 33 bp, Homo sapien
gagagtagtgaggggatgactgcaatggtttag

SEQ ID NO: 1074219 - DNA, 33 bp, Homo sapien
caaactgatcttagaaacttgatttgttgtaac

SEQ ID NO: 1074220 - DNA, 33 bp, Homo sapien
caaactgatcttagaagcttgatttgttgtaac

SEQ ID NO: 1074221 - DNA, 33 bp, Homo sapien
gaactgacaatggtgcagaagtttatgttcaat

SEQ ID NO: 1074222 - DNA, 33 bp, Homo sapien
gaactgacaatggtgcggaagtttatgttcaat

SEQ ID NO: 1074223 - DNA, 33 bp, Homo sapien
agtttgggaagagttcaagaaagatcaagaacc

SEQ ID NO: 1074224 - DNA, 33 bp, Homo sapien
agtttgggaagagttcgagaaagatcaagaacc

SEQ ID NO: 1074225 - DNA, 33 bp, Homo sapien
tgtgatgctgcaaccaatctaatttttccagtc

SEQ ID NO: 1074226 - DNA, 33 bp, Homo sapien
tgtgatgctgcaaccagtctaatttttccagtc

SEQ ID NO: 1074227 - DNA, 33 bp, Homo sapien
gtttctcaggtgccaacacctggagctagttta

SEQ ID NO: 1074228 - DNA, 33 bp, Homo sapien
gtttctcaggtgccaatacctggagctagttta

SEQ ID NO: 1074229 - DNA, 33 bp, Homo sapien
atcaccactgtggaaaagaggtaagagcgctgg

SEQ ID NO: 1074230 - DNA, 33 bp, Homo sapien
atcaccactgtggaaacgaggtaagagcgctgg

SEQ ID NO: 1074231 - DNA, 33 bp, Homo sapien
tccctgtgtcaatatcactcctcaggcattgtc

SEQ ID NO: 1074232 - DNA, 33 bp, Homo sapien
tccctgtgtcaatatcgctcctcaggcattgtc

SEQ ID NO: 1074233 - DNA, 33 bp, Homo sapien
tcctatcagctcgacactggatcaccattcacc

SEQ ID NO: 1074234 - DNA, 33 bp, Homo sapien
tcctatcagctcgacattggatcaccattcacc

SEQ ID NO: 1074235 - DNA, 33 bp, Homo sapien
agtttactgttgccaagatatagcaatggtatc

SEQ ID NO: 1074236 - DNA, 33 bp, Homo sapien
agtttactgttgccaatatatagcaatggtatc

SEQ ID NO: 1074237 - DNA, 33 bp, Homo sapien
atatagcaagataaacgatctccttgaaatcat

SEQ ID NO: 1074238 - DNA, 33 bp, Homo sapien
atatagcaagataaactatctccttgaaatcat

SEQ ID NO: 1074239 - DNA, 33 bp, Homo sapien
ctgcagctttcagacacccagatatggaaaaac

SEQ ID NO: 1074240 - DNA, 33 bp, Homo sapien
ctgcagctttcagacatccagatatggaaaaac

SEQ ID NO: 1074241 - DNA, 33 bp, Homo sapien
tatgtatattggcttaagtcaggtggatagcct

SEQ ID NO: 1074242 - DNA, 33 bp, Homo sapien
tatgtatattggcttatgtcaggtggatagcct

SEQ ID NO: 1074243 - DNA, 33 bp, Homo sapien
gccttgaataagctcacgatttccttagattta

SEQ ID NO: 1074244 - DNA, 33 bp, Homo sapien
gccttgaataagctcatgatttccttagattta

SEQ ID NO: 1074245 - DNA, 33 bp, Homo sapien
gtaactttcttcttcaatcctaatcctagttgt

SEQ ID NO: 1074246 - DNA, 33 bp, Homo sapien
gtaactttcttcttcactcctaatcctagttgt

SEQ ID NO: 1074247 - DNA, 33 bp, Homo sapien
tggcccgaagcctggcgcatagtaggaacatac

SEQ ID NO: 1074248 - DNA, 33 bp, Homo sapien
tggcccgaagcctggctcatagtaggaacatac

SEQ ID NO: 1074249 - DNA, 33 bp, Homo sapien
aaatggagttattcatcagcaagaacgatgtca

SEQ ID NO: 1074250 - DNA, 33 bp, Homo sapien
aaatggagttattcatgagcaagaacgatgtca

SEQ ID NO: 1074251 - DNA, 33 bp, Homo sapien
aaggttgaactatgcaatgatgagtgtttcatg

SEQ ID NO: 1074252 - DNA, 33 bp, Homo sapien
aaggttgaactatgcagtgatgagtgtttcatg

SEQ ID NO: 1074253 - DNA, 33 bp, Homo sapien
ttaaagaaagatctgaaaggatagaactgttta

SEQ ID NO: 1074254 - DNA, 33 bp, Homo sapien
ttaaagaaagatctgataggatagaactgttta

SEQ ID NO: 1074255 - DNA, 33 bp, Homo sapien
ttttagtgtatagtcccgatatctgatgaatac

SEQ ID NO: 1074256 - DNA, 33 bp, Homo sapien
ttttagtgtatagtcctgatatctgatgaatac

SEQ ID NO: 1074257 - DNA, 33 bp, Homo sapien
ggcccaggtacgtgaaatcaaaccatctggatg

SEQ ID NO: 1074258 - DNA, 33 bp, Homo sapien
ggcccaggtacgtgaagtcaaaccatctggatg

SEQ ID NO: 1074259 - DNA, 33 bp, Homo sapien
cctttgaaaaactgtaccttccctgcatccaac

SEQ ID NO: 1074260 - DNA, 33 bp, Homo sapien
cctttgaaaaactgtatcttccctgcatccaac

SEQ ID NO: 1074261 - DNA, 33 bp, Homo sapien
cagtatgttttgggaacggtcatttctgaagtg

SEQ ID NO: 1074262 - DNA, 33 bp, Homo sapien
cagtatgttttgggaatggtcatttctgaagtg

SEQ ID NO: 1074263 - DNA, 33 bp, Homo sapien
ctcccttttgtttcaacataggaactggaaatg

SEQ ID NO: 1074264 - DNA, 33 bp, Homo sapien
ctcccttttgtttcaagataggaactggaaatg

SEQ ID NO: 1074265 - DNA, 33 bp, Homo sapien
aataatggtgtttggaggctacagacccaacac

SEQ ID NO: 1074266 - DNA, 33 bp, Homo sapien
aataatggtgtttggatgctacagacccaacac

SEQ ID NO: 1074267 - DNA, 33 bp, Homo sapien
gaggggccaaaataaaagaatgtgttacatgtt

SEQ ID NO: 1074268 - DNA, 33 bp, Homo sapien
gaggggccaaaataaaggaatgtgttacatgtt

SEQ ID NO: 1074269 - DNA, 33 bp, Homo sapien
agagagtgtagagctccgaatacagtctaattg

SEQ ID NO: 1074270 - DNA, 33 bp, Homo sapien
agagagtgtagagctctgaatacagtctaattg

SEQ ID NO: 1074271 - DNA, 33 bp, Homo sapien
gggcatttaccactcaagacaaaggtcccacag

SEQ ID NO: 1074272 - DNA, 33 bp, Homo sapien
gggcatttaccactcaggacaaaggtcccacag

SEQ ID NO: 1074273 - DNA, 33 bp, Homo sapien
aataatctgttcttcccaagtaatgtcttaagt

SEQ ID NO: 1074274 - DNA, 33 bp, Homo sapien
aataatctgttcttcctaagtaatgtcttaagt

SEQ ID NO: 1074275 - DNA, 33 bp, Homo sapien
cacccaaggctctctacaatacaacccaattca

SEQ ID NO: 1074276 - DNA, 33 bp, Homo sapien
cacccaaggctctctataatacaacccaattca

SEQ ID NO: 1074277 - DNA, 33 bp, Homo sapien
attctcaaatattcaaatcccgtgtcttagcaa

SEQ ID NO: 1074278 - DNA, 33 bp, Homo sapien
attctcaaatattcaattcccgtgtcttagcaa

SEQ ID NO: 1074279 - DNA, 33 bp, Homo sapien
acacaaacaagtcttcacataggttagtggcaa

SEQ ID NO: 1074280 - DNA, 33 bp, Homo sapien
acacaaacaagtcttcgcataggttagtggcaa

SEQ ID NO: 1074281 - DNA, 33 bp, Homo sapien
aaactgcactctgaagaaccatattcctttgag

SEQ ID NO: 1074282 - DNA, 33 bp, Homo sapien
aaactgcactctgaaggaccatattcctttgag

SEQ ID NO: 1074283 - DNA, 33 bp, Homo sapien
aatatatattaaaagaaggaatgtacgagtatg

SEQ ID NO: 1074284 - DNA, 33 bp, Homo sapien
aatatatattaaaagagggaatgtacgagtatg

SEQ ID NO: 1074285 - DNA, 33 bp, Homo sapien
agctaaaaatcctccacgagatgtttctctccc

SEQ ID NO: 1074286 - DNA, 33 bp, Homo sapien
agctaaaaatcctccatgagatgtttctctccc

SEQ ID NO: 1074287 - DNA, 33 bp, Homo sapien
gcagtgtgggaggctaaaatcaagagcactgtt

SEQ ID NO: 1074288 - DNA, 33 bp, Homo sapien
gcagtgtgggaggctagaatcaagagcactgtt

SEQ ID NO: 1074289 - DNA, 33 bp, Homo sapien
aaggtaatgagttggagatgttttatgttgtaa

SEQ ID NO: 1074290 - DNA, 33 bp, Homo sapien
aaggtaatgagttggatatgttttatgttgtaa

SEQ ID NO: 1074291 - DNA, 33 bp, Homo sapien
taccttataagggaagcctctgatccagatttc

SEQ ID NO: 1074292 - DNA, 33 bp, Homo sapien
taccttataagggaaggctctgatccagatttc

SEQ ID NO: 1074293 - DNA, 33 bp, Homo sapien
ccgttctctaagacaacgaatgtatcatcaatt

SEQ ID NO: 1074294 - DNA, 33 bp, Homo sapien
ccgttctctaagacaatgaatgtatcatcaatt

SEQ ID NO: 1074295 - DNA, 33 bp, Homo sapien
gaaattgtgatgtgaaatgcatcaaagtttgta

SEQ ID NO: 1074296 - DNA, 33 bp, Homo sapien
gaaattgtgatgtgaactgcatcaaagtttgta

SEQ ID NO: 1074297 - DNA, 33 bp, Homo sapien
accaatgtacagtccaaggccaaatcaaaatgg

SEQ ID NO: 1074298 - DNA, 33 bp, Homo sapien
accaatgtacagtccacggccaaatcaaaatgg

SEQ ID NO: 1074299 - DNA, 33 bp, Homo sapien
agcgtggagtttgggaaaagtcaattagaaggc

SEQ ID NO: 1074300 - DNA, 33 bp, Homo sapien
agcgtggagtttgggacaagtcaattagaaggc

SEQ ID NO: 1074301 - DNA, 33 bp, Homo sapien
ttagcctctgcaaatccctttgtggcacacgga

SEQ ID NO: 1074302 - DNA, 33 bp, Homo sapien
ttagcctctgcaaatctctttgtggcacacgga

SEQ ID NO: 1074303 - DNA, 33 bp, Homo sapien
atatccatgaggttaggagtttttatttaattt

SEQ ID NO: 1074304 - DNA, 33 bp, Homo sapien
atatccatgaggttagtagtttttatttaattt

SEQ ID NO: 1074305 - DNA, 33 bp, Homo sapien
ggaggtggctccagagaatttcagaaaacatcc

SEQ ID NO: 1074306 - DNA, 33 bp, Homo sapien
ggaggtggctccagagcatttcagaaaacatcc

SEQ ID NO: 1074307 - DNA, 33 bp, Homo sapien
cagtagcttcttgaggacacaaggtagcctgca

SEQ ID NO: 1074308 - DNA, 33 bp, Homo sapien
cagtagcttcttgagggcacaaggtagcctgca

SEQ ID NO: 1074309 - DNA, 33 bp, Homo sapien
tgggccttcagaccctcaactgctggcttccag

SEQ ID NO: 1074310 - DNA, 33 bp, Homo sapien
tgggccttcagacccttaactgctggcttccag

SEQ ID NO: 1074311 - DNA, 33 bp, Homo sapien
ctcctctagattgttaactcctcggctgttcct

SEQ ID NO: 1074312 - DNA, 33 bp, Homo sapien
ctcctctagattgttacctcctcggctgttcct

SEQ ID NO: 1074313 - DNA, 33 bp, Homo sapien
ctcactgacctgtgcgcaatcggatgaagaggt

SEQ ID NO: 1074314 - DNA, 33 bp, Homo sapien
ctcactgacctgtgcgtaatcggatgaagaggt

SEQ ID NO: 1074315 - DNA, 33 bp, Homo sapien
gctggctgctgctgacaagccataagacctggg

SEQ ID NO: 1074316 - DNA, 33 bp, Homo sapien
gctggctgctgctgacgagccataagacctggg

SEQ ID NO: 1074317 - DNA, 33 bp, Homo sapien
gtttgtggagagtacacactgcgttggctgggc

SEQ ID NO: 1074318 - DNA, 33 bp, Homo sapien
gtttgtggagagtacagactgcgttggctgggc

SEQ ID NO: 1074319 - DNA, 33 bp, Homo sapien
cagttgccttgctcctcactccctgccctggaa

SEQ ID NO: 1074320 - DNA, 33 bp, Homo sapien
cagttgccttgctccttactccctgccctggaa

SEQ ID NO: 1074321 - DNA, 33 bp, Homo sapien
agctggctaggtctccaaagactcctcctgttg

SEQ ID NO: 1074322 - DNA, 33 bp, Homo sapien
agctggctaggtctccgaagactcctcctgttg

SEQ ID NO: 1074323 - DNA, 33 bp, Homo sapien
tgctgaataaatccaacacataatggaaaacgt

SEQ ID NO: 1074324 - DNA, 33 bp, Homo sapien
tgctgaataaatccaatacataatggaaaacgt

SEQ ID NO: 1074325 - DNA, 33 bp, Homo sapien
gtgttctgtacatgcccaatactgggaacttct

SEQ ID NO: 1074326 - DNA, 33 bp, Homo sapien
gtgttctgtacatgcctaatactgggaacttct

SEQ ID NO: 1074327 - DNA, 33 bp, Homo sapien
ctccccaggagggctgaaaacggcctgcgaact

SEQ ID NO: 1074328 - DNA, 33 bp, Homo sapien
ctccccaggagggctgcaaacggcctgcgaact

SEQ ID NO: 1074329 - DNA, 33 bp, Homo sapien
ttttcctgtacgaaaacctattactatttacta

SEQ ID NO: 1074330 - DNA, 33 bp, Homo sapien
ttttcctgtacgaaaatctattactatttacta

SEQ ID NO: 1074331 - DNA, 33 bp, Homo sapien
actcaagatcttctccaagatgttcctccttcc

SEQ ID NO: 1074332 - DNA, 33 bp, Homo sapien
actcaagatcttctccgagatgttcctccttcc

SEQ ID NO: 1074333 - DNA, 33 bp, Homo sapien
tatagatttattaaacaactattgacactcttc

SEQ ID NO: 1074334 - DNA, 33 bp, Homo sapien
tatagatttattaaacgactattgacactcttc

SEQ ID NO: 1074335 - DNA, 33 bp, Homo sapien
gaagatgtttagagaaatcgtcagacttcctag

SEQ ID NO: 1074336 - DNA, 33 bp, Homo sapien
gaagatgtttagagaagtcgtcagacttcctag

SEQ ID NO: 1074337 - DNA, 33 bp, Homo sapien
catgaaagtccgaagcgaatctgaacatgatgg

SEQ ID NO: 1074338 - DNA, 33 bp, Homo sapien
catgaaagtccgaagctaatctgaacatgatgg

SEQ ID NO: 1074339 - DNA, 33 bp, Homo sapien
gcagctaggaacacagaatccatggcttcctgg

SEQ ID NO: 1074340 - DNA, 33 bp, Homo sapien
gcagctaggaacacaggatccatggcttcctgg

SEQ ID NO: 1074341 - DNA, 33 bp, Homo sapien
atccatgaaggagacaacaaagacaatctaaag

SEQ ID NO: 1074342 - DNA, 33 bp, Homo sapien
atccatgaaggagacagcaaagacaatctaaag

SEQ ID NO: 1074343 - DNA, 33 bp, Homo sapien
ctcctctctgctggcaagtcatccttctgtctc

SEQ ID NO: 1074344 - DNA, 33 bp, Homo sapien
ctcctctctgctggcaggtcatccttctgtctc

SEQ ID NO: 1074345 - DNA, 33 bp, Homo sapien
atccctcttcttggaacgtccttttctagactc

SEQ ID NO: 1074346 - DNA, 33 bp, Homo sapien
atccctcttcttggaatgtccttttctagactc

SEQ ID NO: 1074347 - DNA, 33 bp, Homo sapien
tgattgtgaacaccaactagatgtttctaaaat

SEQ ID NO: 1074348 - DNA, 33 bp, Homo sapien
tgattgtgaacaccaagtagatgtttctaaaat

SEQ ID NO: 1074349 - DNA, 33 bp, Homo sapien
cttatctgcctaataacctgggattcattcgga

SEQ ID NO: 1074350 - DNA, 33 bp, Homo sapien
cttatctgcctaataagctgggattcattcgga

SEQ ID NO: 1074351 - DNA, 33 bp, Homo sapien
acactttcaagacacacgatgagtaggaaacct

SEQ ID NO: 1074352 - DNA, 33 bp, Homo sapien
acactttcaagacacatgatgagtaggaaacct

SEQ ID NO: 1074353 - DNA, 33 bp, Homo sapien
caatacctgggctccaacctattgccacctctt

SEQ ID NO: 1074354 - DNA, 33 bp, Homo sapien
caatacctgggctccatcctattgccacctctt

SEQ ID NO: 1074355 - DNA, 33 bp, Homo sapien
cccagctgtagcttccacaactgtcctttcagt

SEQ ID NO: 1074356 - DNA, 33 bp, Homo sapien
cccagctgtagcttcctcaactgtcctttcagt

SEQ ID NO: 1074357 - DNA, 33 bp, Homo sapien
caaggttgacctaaaaaaggatcaggtccagtg

SEQ ID NO: 1074358 - DNA, 33 bp, Homo sapien
caaggttgacctaaaagaggatcaggtccagtg

SEQ ID NO: 1074359 - DNA, 33 bp, Homo sapien
atttgcctcagagttacattcttctgacttctc

SEQ ID NO: 1074360 - DNA, 33 bp, Homo sapien
atttgcctcagagttatattcttctgacttctc

SEQ ID NO: 1074361 - DNA, 33 bp, Homo sapien
ctgaggctttaatcataaacagttgattctaaa

SEQ ID NO: 1074362 - DNA, 33 bp, Homo sapien
ctgaggctttaatcatgaacagttgattctaaa

SEQ ID NO: 1074363 - DNA, 33 bp, Homo sapien; identical to SEQ ID NO: 1074361

SEQ ID NO: 1074364 - DNA, 33 bp, Homo sapien; identical to SEQ ID NO: 1074362

SEQ ID NO: 1074365 - DNA, 33 bp, Homo sapien
taagcaactctgagtacgactgttttgtaggtc

SEQ ID NO: 1074366 - DNA, 33 bp, Homo sapien
taagcaactctgagtatgactgttttgtaggtc

SEQ ID NO: 1074367 - DNA, 33 bp, Homo sapien
atttcatatgagaaggaatcttgcatggtaaat

SEQ ID NO: 1074368 - DNA, 33 bp, Homo sapien
atttcatatgagaagggatcttgcatggtaaat

SEQ ID NO: 1074369 - DNA, 33 bp, Homo sapien
tgttcattgtctcctcgaacagaaagtccagca

SEQ ID NO: 1074370 - DNA, 33 bp, Homo sapien
tgttcattgtctcctctaacagaaagtccagca

SEQ ID NO: 1074371 - DNA, 33 bp, Homo sapien
ctttctccctcctttcaatggcaaacatggcag

SEQ ID NO: 1074372 - DNA, 33 bp, Homo sapien
ctttctccctcctttcgatggcaaacatggcag

SEQ ID NO: 1074373 - DNA, 33 bp, Homo sapien
tcccatatccattttacgaagggacaaacacta

SEQ ID NO: 1074374 - DNA, 33 bp, Homo sapien
tcccatatccattttatgaagggacaaacacta

SEQ ID NO: 1074375 - DNA, 33 bp, Homo sapien
tccccaaaacttactcgcatgattactcttcct

SEQ ID NO: 1074376 - DNA, 33 bp, Homo sapien
tccccaaaacttactctcatgattactcttcct

SEQ ID NO: 1074377 - DNA, 33 bp, Homo sapien
tgccagtgtctatctaactgcagagaaaggggt

SEQ ID NO: 1074378 - DNA, 33 bp, Homo sapien
tgccagtgtctatctatctgcagagaaaggggt

SEQ ID NO: 1074379 - DNA, 33 bp, Homo sapien
tggttcagaaaagagacagcaactttattttct

SEQ ID NO: 1074380 - DNA, 33 bp, Homo sapien
tggttcagaaaagagagagcaactttattttct

SEQ ID NO: 1074381 - DNA, 33 bp, Homo sapien
agaaggagccagggaaaaagactgagaaatgtg

SEQ ID NO: 1074382 - DNA, 33 bp, Homo sapien
agaaggagccagggaacaagactgagaaatgtg

SEQ ID NO: 1074383 - DNA, 33 bp, Homo sapien
caatacattgtgattacgtaccagttctgggag

SEQ ID NO: 1074384 - DNA, 33 bp, Homo sapien
caatacattgtgattaggtaccagttctgggag

SEQ ID NO: 1074385 - DNA, 33 bp, Homo sapien
gttaaggactgagtgaatagtcgagaggcctgc

SEQ ID NO: 1074386 - DNA, 33 bp, Homo sapien
gttaaggactgagtgagtagtcgagaggcctgc

SEQ ID NO: 1074387 - DNA, 33 bp, Homo sapien
tggaatattactcaaccataaagagcattgaag

SEQ ID NO: 1074388 - DNA, 33 bp, Homo sapien
tggaatattactcaacgataaagagcattgaag

SEQ ID NO: 1074389 - DNA, 33 bp, Homo sapien
caacctggacatagaaagtagagcaagcttgtc

SEQ ID NO: 1074390 - DNA, 33 bp, Homo sapien
caacctggacatagaatgtagagcaagcttgtc

SEQ ID NO: 1074391 - DNA, 33 bp, Homo sapien
aatgttctctgtccttcaaatacagtgtcgact

SEQ ID NO: 1074392 - DNA, 33 bp, Homo sapien
aatgttctctgtccttgaaatacagtgtcgact

SEQ ID NO: 1074393 - DNA, 33 bp, Homo sapien
gatgctttttgataggccatgtaggataaatac

SEQ ID NO: 1074394 - DNA, 33 bp, Homo sapien
gatgctttttgataggtcatgtaggataaatac

SEQ ID NO: 1074395 - DNA, 33 bp, Homo sapien
caaatggaaaatgcacagccttttataacccaa

SEQ ID NO: 1074396 - DNA, 33 bp, Homo sapien
caaatggaaaatgcacggccttttataacccaa

SEQ ID NO: 1074397 - DNA, 33 bp, Homo sapien
atgtgtatgacttttaagctaccatgcctttca

SEQ ID NO: 1074398 - DNA, 33 bp, Homo sapien
atgtgtatgacttttaggctaccatgcctttca

SEQ ID NO: 1074399 - DNA, 33 bp, Homo sapien
gtggggaaagattgccaagaaacataaggaaat

SEQ ID NO: 1074400 - DNA, 33 bp, Homo sapien
gtggggaaagattgccgagaaacataaggaaat

SEQ ID NO: 1074401 - DNA, 33 bp, Homo sapien
gatttttgcgtgagcacgtcaggttgagcccag

SEQ ID NO: 1074402 - DNA, 33 bp, Homo sapien
gatttttgcgtgagcatgtcaggttgagcccag

SEQ ID NO: 1074403 - DNA, 33 bp, Homo sapien
acttatatttccataaacagcagaaagccattg

SEQ ID NO: 1074404 - DNA, 33 bp, Homo sapien
acttatatttccataagcagcagaaagccattg

SEQ ID NO: 1074405 - DNA, 33 bp, Homo sapien
gcagtaaaactgatgacataaagaaattaaaag

SEQ ID NO: 1074406 - DNA, 33 bp, Homo sapien
gcagtaaaactgatgagataaagaaattaaaag

SEQ ID NO: 1074407 - DNA, 33 bp, Homo sapien; identical to SEQ ID NO: 1074405

SEQ ID NO: 1074408 - DNA, 33 bp, Homo sapien; identical to SEQ ID NO: 1074406

SEQ ID NO: 1074409 - DNA, 33 bp, Homo sapien
gctcattcaagattcccctccctctgtcaggaa

SEQ ID NO: 1074410 - DNA, 33 bp, Homo sapien
gctcattcaagattcctctccctctgtcaggaa

SEQ ID NO: 1074411 - DNA, 33 bp, Homo sapien
accctccctttgttgacctgaggccacttcctt

SEQ ID NO: 1074412 - DNA, 33 bp, Homo sapien
accctccctttgttgatctgaggccacttcctt

SEQ ID NO: 1074413 - DNA, 33 bp, Homo sapien
tccctcccagagaccaatgatccttgtataaga

SEQ ID NO: 1074414 - DNA, 33 bp, Homo sapien
tccctcccagagaccagtgatccttgtataaga

SEQ ID NO: 1074415 - DNA, 33 bp, Homo sapien
cactggccttaggcacactgcatgactttccag

SEQ ID NO: 1074416 - DNA, 33 bp, Homo sapien
cactggccttaggcacgctgcatgactttccag

SEQ ID NO: 1074417 - DNA, 33 bp, Homo sapien
gttggggcactaatgaacctgtgtcacatcaag

SEQ ID NO: 1074418 - DNA, 33 bp, Homo sapien
gttggggcactaatgatcctgtgtcacatcaag

SEQ ID NO: 1074419 - DNA, 33 bp, Homo sapien
ttctagagctgtatgacggattccttcactcat

SEQ ID NO: 1074420 - DNA, 33 bp, Homo sapien
ttctagagctgtatgatggattccttcactcat

SEQ ID NO: 1074421 - DNA, 33 bp, Homo sapien
catgtagggtctagaacatgaatggaaatctgg

SEQ ID NO: 1074422 - DNA, 33 bp, Homo sapien
catgtagggtctagaatatgaatggaaatctgg

SEQ ID NO: 1074423 - DNA, 33 bp, Homo sapien
ctcagatgttttatgaccgctgtatcttcacta

SEQ ID NO: 1074424 - DNA, 33 bp, Homo sapien
ctcagatgttttatgatcgctgtatcttcacta

SEQ ID NO: 1074425 - DNA, 33 bp, Homo sapien
atagatgaagttgtgacctacagctttttcaac

SEQ ID NO: 1074426 - DNA, 33 bp, Homo sapien
atagatgaagttgtgatctacagctttttcaac

SEQ ID NO: 1074427 - DNA, 33 bp, Homo sapien
aagtacagttagggcaaaaaagttatatctgtt

SEQ ID NO: 1074428 - DNA, 33 bp, Homo sapien
aagtacagttagggcagaaaagttatatctgtt

SEQ ID NO: 1074429 - DNA, 33 bp, Homo sapien
atcaattttaaataacaaatctgaagtggacac

SEQ ID NO: 1074430 - DNA, 33 bp, Homo sapien
atcaattttaaataacgaatctgaagtggacac

SEQ ID NO: 1074431 - DNA, 33 bp, Homo sapien
tgaaaacgtctctcatcatacttgcccttcttc

SEQ ID NO: 1074432 - DNA, 33 bp, Homo sapien
tgaaaacgtctctcattatacttgcccttcttc

SEQ ID NO: 1074433 - DNA, 33 bp, Homo sapien
agaaagtggatttggtgaacagttggcaagtgt

SEQ ID NO: 1074434 - DNA, 33 bp, Homo sapien
agaaagtggatttggttaacagttggcaagtgt

SEQ ID NO: 1074435 - DNA, 33 bp, Homo sapien
ctccttcatattcagagagtcaataggactttt

SEQ ID NO: 1074436 - DNA, 33 bp, Homo sapien
ctccttcatattcagatagtcaataggactttt

SEQ ID NO: 1074437 - DNA, 33 bp, Homo sapien
catttctagaaacacaccgggtcagaaggaaac

SEQ ID NO: 1074438 - DNA, 33 bp, Homo sapien
catttctagaaacacagcgggtcagaaggaaac

SEQ ID NO: 1074439 - DNA, 33 bp, Homo sapien
cagtagccaggaagtacttacaggaagccttga

SEQ ID NO: 1074440 - DNA, 33 bp, Homo sapien
cagtagccaggaagtagttacaggaagccttga

SEQ ID NO: 1074441 - DNA, 33 bp, Homo sapien
aacactgttcgatgtgccaaagcaggctcccag

SEQ ID NO: 1074442 - DNA, 33 bp, Homo sapien
aacactgttcgatgtgtcaaagcaggctcccag

SEQ ID NO: 1074443 - DNA, 33 bp, Homo sapien
ccatactaaatgccccaacttattttgattatg

SEQ ID NO: 1074444 - DNA, 33 bp, Homo sapien
ccatactaaatgccccgacttattttgattatg

SEQ ID NO: 1074445 - DNA, 33 bp, Homo sapien
acagtcaaaccctaaacggcatcaaaagatata

SEQ ID NO: 1074446 - DNA, 33 bp, Homo sapien
acagtcaaaccctaaatggcatcaaaagatata

SEQ ID NO: 1074447 - DNA, 33 bp, Homo sapien
taaatggacagcctacagaatgggaaaaataat

SEQ ID NO: 1074448 - DNA, 33 bp, Homo sapien
taaatggacagcctacggaatgggaaaaataat

SEQ ID NO: 1074449 - DNA, 33 bp, Homo sapien
cccagaattttactgccgattgatattgatatt

SEQ ID NO: 1074450 - DNA, 33 bp, Homo sapien
cccagaattttactgctgattgatattgatatt

SEQ ID NO: 1074451 - DNA, 33 bp, Homo sapien
ttttctgcatcaacatcatatggtggtggccat

SEQ ID NO: 1074452 - DNA, 33 bp, Homo sapien
ttttctgcatcaacattatatggtggtggccat

SEQ ID NO: 1074453 - DNA, 33 bp, Homo sapien
cttttgaggcatgatactactaaaagcatggcc

SEQ ID NO: 1074454 - DNA, 33 bp, Homo sapien
cttttgaggcatgatattactaaaagcatggcc

SEQ ID NO: 1074455 - DNA, 33 bp, Homo sapien
tgaatataattttgtgcaccatgattttttgtc

SEQ ID NO: 1074456 - DNA, 33 bp, Homo sapien
tgaatataattttgtgtaccatgattttttgtc

SEQ ID NO: 1074457 - DNA, 33 bp, Homo sapien
agatatggtatcccagcaaagaatcacagagta

SEQ ID NO: 1074458 - DNA, 33 bp, Homo sapien
agatatggtatcccaggaaagaatcacagagta

SEQ ID NO: 1074459 - DNA, 33 bp, Homo sapien
tgttgtttgatgcctccaatgtagcacagggct

SEQ ID NO: 1074460 - DNA, 33 bp, Homo sapien
tgttgtttgatgcctctaatgtagcacagggct

SEQ ID NO: 1074461 - DNA, 33 bp, Homo sapien
catttgacaatcaattcaacccaccataacaac

SEQ ID NO: 1074462 - DNA, 33 bp, Homo sapien
catttgacaatcaatttaacccaccataacaac

SEQ ID NO: 1074463 - DNA, 33 bp, Homo sapien
gctgaaacagaaaaataaactcagcaataggct

SEQ ID NO: 1074464 - DNA, 33 bp, Homo sapien
gctgaaacagaaaaatgaactcagcaataggct

SEQ ID NO: 1074465 - DNA, 33 bp, Homo sapien
ataaaaagtgaagtaccattttcaaggaaagga

SEQ ID NO: 1074466 - DNA, 33 bp, Homo sapien
ataaaaagtgaagtacgattttcaaggaaagga

SEQ ID NO: 1074467 - DNA, 33 bp, Homo sapien
ccttttgttaggactacggatcttgagaaaagt

SEQ ID NO: 1074468 - DNA, 33 bp, Homo sapien
ccttttgttaggactatggatcttgagaaaagt

SEQ ID NO: 1074469 - DNA, 33 bp, Homo sapien
ctcttgacaactacccccttcctactctggttg

SEQ ID NO: 1074470 - DNA, 33 bp, Homo sapien
ctcttgacaactacccgcttcctactctggttg

SEQ ID NO: 1074471 - DNA, 33 bp, Homo sapien
ggccaaactggtctaccgcaagggccgaatcct

SEQ ID NO: 1074472 - DNA, 33 bp, Homo sapien
ggccaaactggtctacggcaagggccgaatcct

SEQ ID NO: 1074473 - DNA, 33 bp, Homo sapien
attccttccttgcatacgggggacagtgagaag

SEQ ID NO: 1074474 - DNA, 33 bp, Homo sapien
attccttccttgcatatgggggacagtgagaag

SEQ ID NO: 1074475 - DNA, 33 bp, Homo sapien
agatgatagaaataaacagagaaagatggtgga

SEQ ID NO: 1074476 - DNA, 33 bp, Homo sapien
agatgatagaaataaagagagaaagatggtgga

SEQ ID NO: 1074477 - DNA, 33 bp, Homo sapien
atctatctgtcaataaattatctatcacctatc

SEQ ID NO: 1074478 - DNA, 33 bp, Homo sapien
atctatctgtcaataagttatctatcacctatc

SEQ ID NO: 1074479 - DNA, 33 bp, Homo sapien
cggatttcggtaggaaaaatactgtcatcagcc

SEQ ID NO: 1074480 - DNA, 33 bp, Homo sapien
cggatttcggtaggaataatactgtcatcagcc

SEQ ID NO: 1074481 - DNA, 33 bp, Homo sapien
tgagcagggcccctaacggaagtaggattggcc

SEQ ID NO: 1074482 - DNA, 33 bp, Homo sapien
tgagcagggcccctaatggaagtaggattggcc

SEQ ID NO: 1074483 - DNA, 33 bp, Homo sapien
ctgagtagctgaaacaaaacaaatttatttttt

SEQ ID NO: 1074484 - DNA, 33 bp, Homo sapien
ctgagtagctgaaacacaacaaatttatttttt

SEQ ID NO: 1074485 - DNA, 33 bp, Homo sapien
ataataatagcagtggaaaaagtatttgcttaa

SEQ ID NO: 1074486 - DNA, 33 bp, Homo sapien
ataataatagcagtggtaaaagtatttgcttaa

SEQ ID NO: 1074487 - DNA, 33 bp, Homo sapien; identical to SEQ ID NO: 1074485

SEQ ID NO: 1074488 - DNA, 33 bp, Homo sapien; identical to SEQ ID NO: 1074486

SEQ ID NO: 1074489 - DNA, 33 bp, Homo sapien; identical to SEQ ID NO: 1074485

SEQ ID NO: 1074490 - DNA, 33 bp, Homo sapien; identical to SEQ ID NO: 1074486

SEQ ID NO: 1074491 - DNA, 33 bp, Homo sapien
tctgtaggaatcaataagtgcatggaatgaatg

SEQ ID NO: 1074492 - DNA, 33 bp, Homo sapien
tctgtaggaatcaatacgtgcatggaatgaatg

SEQ ID NO: 1074493 - DNA, 33 bp, Homo sapien; identical to SEQ ID NO: 1074491

SEQ ID NO: 1074494 - DNA, 33 bp, Homo sapien; identical to SEQ ID NO: 1074492

SEQ ID NO: 1074495 - DNA, 33 bp, Homo sapien
gatatccaggtatccacgcttttttttcaaatt

SEQ ID NO: 1074496 - DNA, 33 bp, Homo sapien
gatatccaggtatccatgcttttttttcaaatt

SEQ ID NO: 1074497 - DNA, 33 bp, Homo sapien; identical to SEQ ID NO: 1074495

SEQ ID NO: 1074498 - DNA, 33 bp, Homo sapien; identical to SEQ ID NO: 1074496

SEQ ID NO: 1074499 - DNA, 33 bp, Homo sapien
cctgtggtacaaatgacattgccaattggagct

SEQ ID NO: 1074500 - DNA, 33 bp, Homo sapien
cctgtggtacaaatgagattgccaattggagct

SEQ ID NO: 1074501 - DNA, 33 bp, Homo sapien
aaatgttattacaaaaatgctgtaccaattcaa

SEQ ID NO: 1074502 - DNA, 33 bp, Homo sapien
aaatgttattacaaaagtgctgtaccaattcaa

SEQ ID NO: 1074503 - DNA, 33 bp, Homo sapien; identical to SEQ ID NO: 1074501

SEQ ID NO: 1074504 - DNA, 33 bp, Homo sapien; identical to SEQ ID NO: 1074502

SEQ ID NO: 1074505 - DNA, 33 bp, Homo sapien; identical to SEQ ID NO: 1074485

SEQ ID NO: 1074506 - DNA, 33 bp, Homo sapien; identical to SEQ ID NO: 1074486

SEQ ID NO: 1074507 - DNA, 33 bp, Homo sapien; identical to SEQ ID NO: 1074485

SEQ ID NO: 1074508 - DNA, 33 bp, Homo sapien; identical to SEQ ID NO: 1074486

SEQ ID NO: 1074509 - DNA, 33 bp, Homo sapien; identical to SEQ ID NO: 1074485

SEQ ID NO: 1074510 - DNA, 33 bp, Homo sapien; identical to SEQ ID NO: 1074486

SEQ ID NO: 1074511 - DNA, 33 bp, Homo sapien
taagtattttgatcaactagtgctgtgatctat

SEQ ID NO: 1074512 - DNA, 33 bp, Homo sapien
taagtattttgatcaattagtgctgtgatctat

SEQ ID NO: 1074513 - DNA, 33 bp, Homo sapien
tttcaatcctaagccacggcaatcttatttcta

SEQ ID NO: 1074514 - DNA, 33 bp, Homo sapien
tttcaatcctaagccatggcaatcttatttcta

SEQ ID NO: 1074515 - DNA, 33 bp, Homo sapien
accacagtttacctagaagcactccccctcatc

SEQ ID NO: 1074516 - DNA, 33 bp, Homo sapien
accacagtttacctaggagcactccccctcatc

SEQ ID NO: 1074517 - DNA, 33 bp, Homo sapien
gcgattgattgcagggaatgtctagatagtgac

SEQ ID NO: 1074518 - DNA, 33 bp, Homo sapien
gcgattgattgcaggggatgtctagatagtgac

SEQ ID NO: 1074519 - DNA, 33 bp, Homo sapien
agtgctgcaattgaggaatatacccttagaaca

SEQ ID NO: 1074520 - DNA, 33 bp, Homo sapien
agtgctgcaattgagggatatacccttagaaca

SEQ ID NO: 1074521 - DNA, 33 bp, Homo sapien
agctacatgacagtcaatcaatacatatttgtt

SEQ ID NO: 1074522 - DNA, 33 bp, Homo sapien
agctacatgacagtcattcaatacatatttgtt

SEQ ID NO: 1074523 - DNA, 33 bp, Homo sapien
ggcagcctattagataaaaaactccttaccagc

SEQ ID NO: 1074524 - DNA, 33 bp, Homo sapien
ggcagcctattagatacaaaactccttaccagc

SEQ ID NO: 1074525 - DNA, 33 bp, Homo sapien
tacttttaagacaaaaaaaatagcattaacaca

SEQ ID NO: 1074526 - DNA, 33 bp, Homo sapien
tacttttaagacaaaacaaatagcattaacaca

SEQ ID NO: 1074527 - DNA, 33 bp, Homo sapien
agcatgttcttataacagtgacaagctgtgtca

SEQ ID NO: 1074528 - DNA, 33 bp, Homo sapien
agcatgttcttataactgtgacaagctgtgtca

SEQ ID NO: 1074529 - DNA, 33 bp, Homo sapien
ttgtgaatgaggaaatcaatgcatgaggtgaca

SEQ ID NO: 1074530 - DNA, 33 bp, Homo sapien
ttgtgaatgaggaaattaatgcatgaggtgaca

SEQ ID NO: 1074531 - DNA, 33 bp, Homo sapien
tgctcaacgtcactaaccaacagggcaatgcaa

SEQ ID NO: 1074532 - DNA, 33 bp, Homo sapien
tgctcaacgtcactaatcaacagggcaatgcaa

SEQ ID NO: 1074533 - DNA, 33 bp, Homo sapien
acaggaccgcatgacaagctaactaggccagcc

SEQ ID NO: 1074534 - DNA, 33 bp, Homo sapien
acaggaccgcatgacaggctaactaggccagcc

SEQ ID NO: 1074535 - DNA, 33 bp, Homo sapien
ttgtgttgatgtttaaagaataagtagggagat

SEQ ID NO: 1074536 - DNA, 33 bp, Homo sapien
ttgtgttgatgtttaaggaataagtagggagat

SEQ ID NO: 1074537 - DNA, 33 bp, Homo sapien
agaaaatgtcccagacgcattttgtactgccct

SEQ ID NO: 1074538 - DNA, 33 bp, Homo sapien
agaaaatgtcccagactcattttgtactgccct

SEQ ID NO: 1074539 - DNA, 33 bp, Homo sapien
aataagacagaaaagacgggaatttgtctcaga

SEQ ID NO: 1074540 - DNA, 33 bp, Homo sapien
aataagacagaaaagatgggaatttgtctcaga

SEQ ID NO: 1074541 - DNA, 33 bp, Homo sapien
cttaagacgcagtggtaaatgttcagcttctgt

SEQ ID NO: 1074542 - DNA, 33 bp, Homo sapien
cttaagacgcagtggtgaatgttcagcttctgt

SEQ ID NO: 1074543 - DNA, 33 bp, Homo sapien
gagagggcagagaagacgttccatgagggacat

SEQ ID NO: 1074544 - DNA, 33 bp, Homo sapien
gagagggcagagaagaggttccatgagggacat

SEQ ID NO: 1074545 - DNA, 33 bp, Homo sapien
aggctgggaatccagagaaaagaggtggtttcc

SEQ ID NO: 1074546 - DNA, 33 bp, Homo sapien
aggctgggaatccagataaaagaggtggtttcc

SEQ ID NO: 1074547 - DNA, 33 bp, Homo sapien
acagttcctaatgatcaatttgtgctttttcag

SEQ ID NO: 1074548 - DNA, 33 bp, Homo sapien
acagttcctaatgatccatttgtgctttttcag

SEQ ID NO: 1074549 - DNA, 33 bp, Homo sapien
tcattgatcgtggaagactccaaaagatggtgg

SEQ ID NO: 1074550 - DNA, 33 bp, Homo sapien
tcattgatcgtggaaggctccaaaagatggtgg

SEQ ID NO: 1074551 - DNA, 33 bp, Homo sapien
acctgagaatgactgaacaggccatgcttttct

SEQ ID NO: 1074552 - DNA, 33 bp, Homo sapien
acctgagaatgactgagcaggccatgcttttct

SEQ ID NO: 1074553 - DNA, 33 bp, Homo sapien
tgtcatcagagcttcacgttctttcatccaatt

SEQ ID NO: 1074554 - DNA, 33 bp, Homo sapien
tgtcatcagagcttcatgttctttcatccaatt

SEQ ID NO: 1074555 - DNA, 33 bp, Homo sapien
tgactggtgacaagaacgatgtgaagggagtgg

SEQ ID NO: 1074556 - DNA, 33 bp, Homo sapien
tgactggtgacaagaatgatgtgaagggagtgg

SEQ ID NO: 1074557 - DNA, 33 bp, Homo sapien
ctggctctcatcaaaaaggattggaccagcctg

SEQ ID NO: 1074558 - DNA, 33 bp, Homo sapien
ctggctctcatcaaaagggattggaccagcctg

SEQ ID NO: 1074559 - DNA, 33 bp, Homo sapien
aaggactcatcagttaccccttgtcaaacctga

SEQ ID NO: 1074560 - DNA, 33 bp, Homo sapien
aaggactcatcagttatcccttgtcaaacctga

SEQ ID NO: 1074561 - DNA, 33 bp, Homo sapien
gtacaggccccaagccaaaggcatacaaaaggt

SEQ ID NO: 1074562 - DNA, 33 bp, Homo sapien
gtacaggccccaagccgaaggcatacaaaaggt

SEQ ID NO: 1074563 - DNA, 33 bp, Homo sapien
caaaggaaatgtagaaactgaaggaagggcagc

SEQ ID NO: 1074564 - DNA, 33 bp, Homo sapien
caaaggaaatgtagaacctgaaggaagggcagc

SEQ ID NO: 1074565 - DNA, 33 bp, Homo sapien
ccagctcaggataaggacagcatactgggttga

SEQ ID NO: 1074566 - DNA, 33 bp, Homo sapien
ccagctcaggataagggcagcatactgggttga

SEQ ID NO: 1074567 - DNA, 33 bp, Homo sapien
tcaaacaggtaatccactgcgctcatctctgcc

SEQ ID NO: 1074568 - DNA, 33 bp, Homo sapien
tcaaacaggtaatccattgcgctcatctctgcc

SEQ ID NO: 1074569 - DNA, 33 bp, Homo sapien
cacagatacgtactcaacagaccagagccaggt

SEQ ID NO: 1074570 - DNA, 33 bp, Homo sapien
cacagatacgtactcatcagaccagagccaggt

SEQ ID NO: 1074571 - DNA, 33 bp, Homo sapien
tgcagctcttaggagaactagatttgagcaaag

SEQ ID NO: 1074572 - DNA, 33 bp, Homo sapien
tgcagctcttaggagacctagatttgagcaaag

SEQ ID NO: 1074573 - DNA, 33 bp, Homo sapien
tggtcccatcttcagcaattggcagggttgagc

SEQ ID NO: 1074574 - DNA, 33 bp, Homo sapien
tggtcccatcttcagcgattggcagggttgagc

SEQ ID NO: 1074575 - DNA, 33 bp, Homo sapien
cttagccaaggccttaaaagtggcagaactgag

SEQ ID NO: 1074576 - DNA, 33 bp, Homo sapien
cttagccaaggccttacaagtggcagaactgag

SEQ ID NO: 1074577 - DNA, 33 bp, Homo sapien
gcctagtctcaagacccagaatcagtaacttac

SEQ ID NO: 1074578 - DNA, 33 bp, Homo sapien
gcctagtctcaagacctagaatcagtaacttac

SEQ ID NO: 1074579 - DNA, 33 bp, Homo sapien
ccatctactctccctcaaagttctgctactatc

SEQ ID NO: 1074580 - DNA, 33 bp, Homo sapien
ccatctactctccctcgaagttctgctactatc

SEQ ID NO: 1074581 - DNA, 33 bp, Homo sapien
agtgaccaaagctggacgtgagagccagaaaat

SEQ ID NO: 1074582 - DNA, 33 bp, Homo sapien
agtgaccaaagctggatgtgagagccagaaaat

SEQ ID NO: 1074583 - DNA, 33 bp, Homo sapien
ttttcatttggtcttccactcacctttcactat

SEQ ID NO: 1074584 - DNA, 33 bp, Homo sapien
ttttcatttggtcttcgactcacctttcactat

SEQ ID NO: 1074585 - DNA, 33 bp, Homo sapien
ccagtgcaacgtatagaccacgtgagcgccctt

SEQ ID NO: 1074586 - DNA, 33 bp, Homo sapien
ccagtgcaacgtataggccacgtgagcgccctt

SEQ ID NO: 1074587 - DNA, 33 bp, Homo sapien
ttaaaaaaatgcgtgaagagatctgaggcaggg

SEQ ID NO: 1074588 - DNA, 33 bp, Homo sapien
ttaaaaaaatgcgtgaggagatctgaggcaggg

SEQ ID NO: 1074589 - DNA, 33 bp, Homo sapien
ttttcttcaaacactacgttctgcattggcagg

SEQ ID NO: 1074590 - DNA, 33 bp, Homo sapien
ttttcttcaaacactatgttctgcattggcagg

SEQ ID NO: 1074591 - DNA, 33 bp, Homo sapien
aacagtgttttttttaaggtgtggttcatcttt

SEQ ID NO: 1074592 - DNA, 33 bp, Homo sapien
aacagtgttttttttagggtgtggttcatcttt

SEQ ID NO: 1074593 - DNA, 33 bp, Homo sapien
tcaaaatttttttgtcaattgtggctttaatag

SEQ ID NO: 1074594 - DNA, 33 bp, Homo sapien
tcaaaatttttttgtccattgtggctttaatag

SEQ ID NO: 1074595 - DNA, 33 bp, Homo sapien
ttctatttcattgatgccagtatcatagtcttt

SEQ ID NO: 1074596 - DNA, 33 bp, Homo sapien
ttctatttcattgatgtcagtatcatagtcttt

SEQ ID NO: 1074597 - DNA, 33 bp, Homo sapien
tttaacacaaatcctaccttcagggtgtttgaa

SEQ ID NO: 1074598 - DNA, 33 bp, Homo sapien
tttaacacaaatcctatcttcagggtgtttgaa

SEQ ID NO: 1074599 - DNA, 33 bp, Homo sapien
ggttggaaccaccatcacagttaggtcattctc

SEQ ID NO: 1074600 - DNA, 33 bp, Homo sapien
ggttggaaccaccatcgcagttaggtcattctc

SEQ ID NO: 1074601 - DNA, 33 bp, Homo sapien
ccctcagtatcattcaacgaaagctcaattatt

SEQ ID NO: 1074602 - DNA, 33 bp, Homo sapien
ccctcagtatcattcagcgaaagctcaattatt

SEQ ID NO: 1074603 - DNA, 33 bp, Homo sapien
tcttaacatcctagccaatttttgagtggggat

SEQ ID NO: 1074604 - DNA, 33 bp, Homo sapien
tcttaacatcctagccgatttttgagtggggat

SEQ ID NO: 1074605 - DNA, 33 bp, Homo sapien
cataagataacttctacggttcacacactggtt

SEQ ID NO: 1074606 - DNA, 33 bp, Homo sapien
cataagataacttctatggttcacacactggtt

SEQ ID NO: 1074607 - DNA, 33 bp, Homo sapien
ttgttaagtaggattccatgcttctgggcccgt

SEQ ID NO: 1074608 - DNA, 33 bp, Homo sapien
ttgttaagtaggattctatgcttctgggcccgt

SEQ ID NO: 1074609 - DNA, 33 bp, Homo sapien
gccctgggaaggcctcacatcaaaactgttgcc

SEQ ID NO: 1074610 - DNA, 33 bp, Homo sapien
gccctgggaaggcctcgcatcaaaactgttgcc

SEQ ID NO: 1074611 - DNA, 33 bp, Homo sapien
cttgaacaggcacttcactaaggaagacagata

SEQ ID NO: 1074612 - DNA, 33 bp, Homo sapien
cttgaacaggcacttcgctaaggaagacagata

SEQ ID NO: 1074613 - DNA, 33 bp, Homo sapien
ctgcaaagtacctaaaagtgttctctaactaag

SEQ ID NO: 1074614 - DNA, 33 bp, Homo sapien
ctgcaaagtacctaaaggtgttctctaactaag

SEQ ID NO: 1074615 - DNA, 33 bp, Homo sapien
ggacaatctagtttcaagaaatcaagttccagg

SEQ ID NO: 1074616 - DNA, 33 bp, Homo sapien
ggacaatctagtttcaggaaatcaagttccagg

SEQ ID NO: 1074617 - DNA, 33 bp, Homo sapien
agctcaggagagccaacgataaggtcagtgatg

SEQ ID NO: 1074618 - DNA, 33 bp, Homo sapien
agctcaggagagccaatgataaggtcagtgatg

SEQ ID NO: 1074619 - DNA, 33 bp, Homo sapien
tgttgaagaaacatcaaggaattagagtggcag

SEQ ID NO: 1074620 - DNA, 33 bp, Homo sapien
tgttgaagaaacatcagggaattagagtggcag

SEQ ID NO: 1074621 - DNA, 33 bp, Homo sapien; identical to SEQ ID NO: 1074619

SEQ ID NO: 1074622 - DNA, 33 bp, Homo sapien; identical to SEQ ID NO: 1074620

SEQ ID NO: 1074623 - DNA, 33 bp, Homo sapien
tggataaaagaaatgcactatatatcacaatgg

SEQ ID NO: 1074624 - DNA, 33 bp, Homo sapien
tggataaaagaaatgcgctatatatcacaatgg

SEQ ID NO: 1074625 - DNA, 33 bp, Homo sapien
agcacctgtcctttgaagttctaagctcttgtc

SEQ ID NO: 1074626 - DNA, 33 bp, Homo sapien
agcacctgtcctttgacgttctaagctcttgtc

SEQ ID NO: 1074627 - DNA, 33 bp, Homo sapien
acttttccttgccaccaaaacatgaacagaggt

SEQ ID NO: 1074628 - DNA, 33 bp, Homo sapien
acttttccttgccaccgaaacatgaacagaggt

SEQ ID NO: 1074629 - DNA, 33 bp, Homo sapien
acgtgacccttcctaactgtaagtgggccttac

SEQ ID NO: 1074630 - DNA, 33 bp, Homo sapien
acgtgacccttcctaagtgtaagtgggccttac

SEQ ID NO: 1074631 - DNA, 33 bp, Homo sapien
accatcaacttcactcaacagaggcaacccagt

SEQ ID NO: 1074632 - DNA, 33 bp, Homo sapien
accatcaacttcactcgacagaggcaacccagt

SEQ ID NO: 1074633 - DNA, 33 bp, Homo sapien
tgaaaacaaaagctgcagactaagagaaaacat

SEQ ID NO: 1074634 - DNA, 33 bp, Homo sapien
tgaaaacaaaagctgcggactaagagaaaacat

SEQ ID NO: 1074635 - DNA, 33 bp, Homo sapien
tggctgaatttcgcccaacatctggctgaattt

SEQ ID NO: 1074636 - DNA, 33 bp, Homo sapien
tggctgaatttcgcccgacatctggctgaattt

SEQ ID NO: 1074637 - DNA, 33 bp, Homo sapien
ttggaaagagctatacaaccatgtccaacgtga

SEQ ID NO: 1074638 - DNA, 33 bp, Homo sapien
ttggaaagagctatacgaccatgtccaacgtga

SEQ ID NO: 1074639 - DNA, 33 bp, Homo sapien
aagtcactaaaaccagaaatcaatcgtttaaat

SEQ ID NO: 1074640 - DNA, 33 bp, Homo sapien
aagtcactaaaaccaggaatcaatcgtttaaat

SEQ ID NO: 1074641 - DNA, 33 bp, Homo sapien
gcccgaaatattatacaaccaaagctgtagagg

SEQ ID NO: 1074642 - DNA, 33 bp, Homo sapien
gcccgaaatattataccaccaaagctgtagagg

SEQ ID NO: 1074643 - DNA, 33 bp, Homo sapien
agtgttcaaaacagtgaaaggccttctatctgg

SEQ ID NO: 1074644 - DNA, 33 bp, Homo sapien
agtgttcaaaacagtggaaggccttctatctgg

SEQ ID NO: 1074645 - DNA, 33 bp, Homo sapien
agtcccggagtctgaacgccaaagagccaagag

SEQ ID NO: 1074646 - DNA, 33 bp, Homo sapien
agtcccggagtctgaaggccaaagagccaagag

SEQ ID NO: 1074647 - DNA, 33 bp, Homo sapien
agctgtgtgatgaaaacgtagtgatcgctatag

SEQ ID NO: 1074648 - DNA, 33 bp, Homo sapien
agctgtgtgatgaaaatgtagtgatcgctatag

SEQ ID NO: 1074649 - DNA, 33 bp, Homo sapien
atttcgataggttagcaaaaggagataaaattt

SEQ ID NO: 1074650 - DNA, 33 bp, Homo sapien
atttcgataggttagccaaaggagataaaattt

SEQ ID NO: 1074651 - DNA, 33 bp, Homo sapien
aagaggtcaatatcaccgaggacaacttgcaaa

SEQ ID NO: 1074652 - DNA, 33 bp, Homo sapien
aagaggtcaatatcactgaggacaacttgcaaa

SEQ ID NO: 1074653 - DNA, 33 bp, Homo sapien
aatttgtagtcacttcaataatagtgcaagcaa

SEQ ID NO: 1074654 - DNA, 33 bp, Homo sapien
aatttgtagtcacttcgataatagtgcaagcaa

SEQ ID NO: 1074655 - DNA, 33 bp, Homo sapien
gtgaggaattcttacaagtcagtggtatttggt

SEQ ID NO: 1074656 - DNA, 33 bp, Homo sapien
gtgaggaattcttacaggtcagtggtatttggt

SEQ ID NO: 1074657 - DNA, 33 bp, Homo sapien
ttgagctaccgcagaactggggcatcagtaatg

SEQ ID NO: 1074658 - DNA, 33 bp, Homo sapien
ttgagctaccgcagaattggggcatcagtaatg

SEQ ID NO: 1074659 - DNA, 33 bp, Homo sapien
caaacagccatacaaacccacaaatagtacatt

SEQ ID NO: 1074660 - DNA, 33 bp, Homo sapien
caaacagccatacaaatccacaaatagtacatt

SEQ ID NO: 1074661 - DNA, 33 bp, Homo sapien
gtgtctactgctgaaggagcaaaggacaaggga

SEQ ID NO: 1074662 - DNA, 33 bp, Homo sapien
gtgtctactgctgaagtagcaaaggacaaggga

SEQ ID NO: 1074663 - DNA, 33 bp, Homo sapien
gcattttactcacccacagttgaatatccttca

SEQ ID NO: 1074664 - DNA, 33 bp, Homo sapien
gcattttactcacccatagttgaatatccttca

SEQ ID NO: 1074665 - DNA, 33 bp, Homo sapien
gtgcaagatggatcataaagtgctgatggaggc

SEQ ID NO: 1074666 - DNA, 33 bp, Homo sapien
gtgcaagatggatcatcaagtgctgatggaggc

SEQ ID NO: 1074667 - DNA, 33 bp, Homo sapien
gaaaaatggtgcccacagattattcaaatcagg

SEQ ID NO: 1074668 - DNA, 33 bp, Homo sapien
gaaaaatggtgcccacggattattcaaatcagg

SEQ ID NO: 1074669 - DNA, 33 bp, Homo sapien
ctgtaatccactagaaaccaacgtgggcccgca

SEQ ID NO: 1074670 - DNA, 33 bp, Homo sapien
ctgtaatccactagaagccaacgtgggcccgca

SEQ ID NO: 1074671 - DNA, 33 bp, Homo sapien
cagtccatggagattacgaaactattgaaaatg

SEQ ID NO: 1074672 - DNA, 33 bp, Homo sapien
cagtccatggagattaggaaactattgaaaatg

SEQ ID NO: 1074673 - DNA, 33 bp, Homo sapien
aatgcagcattcttagaagttagaaacttggtg

SEQ ID NO: 1074674 - DNA, 33 bp, Homo sapien
aatgcagcattcttaggagttagaaacttggtg

SEQ ID NO: 1074675 - DNA, 33 bp, Homo sapien
ttaatgaatttgtaaacttagtcttccagaagt

SEQ ID NO: 1074676 - DNA, 33 bp, Homo sapien
ttaatgaatttgtaaagttagtcttccagaagt

SEQ ID NO: 1074677 - DNA, 33 bp, Homo sapien
cgtcgcctgagtacaacacatttttgtgaagga

SEQ ID NO: 1074678 - DNA, 33 bp, Homo sapien
cgtcgcctgagtacaatacatttttgtgaagga

SEQ ID NO: 1074679 - DNA, 33 bp, Homo sapien
caattcacaatcgccaacgtgtggcatcgacct

SEQ ID NO: 1074680 - DNA, 33 bp, Homo sapien
caattcacaatcgccagcgtgtggcatcgacct

SEQ ID NO: 1074681 - DNA, 33 bp, Homo sapien
aattcaccagcgcaaacggaaggtgtaggaata

SEQ ID NO: 1074682 - DNA, 33 bp, Homo sapien
aattcaccagcgcaaagggaaggtgtaggaata

SEQ ID NO: 1074683 - DNA, 33 bp, Homo sapien
tcaactgaggaccccgaacaaaagtgagaagga

SEQ ID NO: 1074684 - DNA, 33 bp, Homo sapien
tcaactgaggaccccggacaaaagtgagaagga

SEQ ID NO: 1074685 - DNA, 33 bp, Homo sapien
aacacgggcattcacaagacaatgtatccagtt

SEQ ID NO: 1074686 - DNA, 33 bp, Homo sapien
aacacgggcattcacaggacaatgtatccagtt

SEQ ID NO: 1074687 - DNA, 33 bp, Homo sapien
gaatcagaaaaacacaataacatgacaagactc

SEQ ID NO: 1074688 - DNA, 33 bp, Homo sapien
gaatcagaaaaacacagtaacatgacaagactc

SEQ ID NO: 1074689 - DNA, 33 bp, Homo sapien
tttcagaaccttgggaactagtgctttcccgag

SEQ ID NO: 1074690 - DNA, 33 bp, Homo sapien
tttcagaaccttgggagctagtgctttcccgag

SEQ ID NO: 1074691 - DNA, 33 bp, Homo sapien
cagggcgcctgaagtaagagtaatgtcctggtg

SEQ ID NO: 1074692 - DNA, 33 bp, Homo sapien
cagggcgcctgaagtaggagtaatgtcctggtg

SEQ ID NO: 1074693 - DNA, 33 bp, Homo sapien
gggtgagggttcaggagattctaggtattcaaa

SEQ ID NO: 1074694 - DNA, 33 bp, Homo sapien
gggtgagggttcaggatattctaggtattcaaa

SEQ ID NO: 1074695 - DNA, 33 bp, Homo sapien
ttaaggctatcgtaaacagaagtgttttcttaa

SEQ ID NO: 1074696 - DNA, 33 bp, Homo sapien
ttaaggctatcgtaaatagaagtgttttcttaa

SEQ ID NO: 1074697 - DNA, 33 bp, Homo sapien
atccttttctctgtaacagttccttgcgtattg

SEQ ID NO: 1074698 - DNA, 33 bp, Homo sapien
atccttttctctgtaagagttccttgcgtattg

SEQ ID NO: 1074699 - DNA, 33 bp, Homo sapien
tggaaatgtcgggtgacggttcagcagttatcg

SEQ ID NO: 1074700 - DNA, 33 bp, Homo sapien
tggaaatgtcgggtgatggttcagcagttatcg

SEQ ID NO: 1074701 - DNA, 33 bp, Homo sapien
catgggatagtaagtaccatattacagcagtga

SEQ ID NO: 1074702 - DNA, 33 bp, Homo sapien
catgggatagtaagtagcatattacagcagtga

SEQ ID NO: 1074703 - DNA, 33 bp, Homo sapien
aacagggagccataagaatgccagaagtatctc

SEQ ID NO: 1074704 - DNA, 33 bp, Homo sapien
aacagggagccataaggatgccagaagtatctc

SEQ ID NO: 1074705 - DNA, 33 bp, Homo sapien
ggggtccaggcactgacataagtttagagcccc

SEQ ID NO: 1074706 - DNA, 33 bp, Homo sapien
ggggtccaggcactgatataagtttagagcccc

SEQ ID NO: 1074707 - DNA, 33 bp, Homo sapien
ggaaatgccttctagacagctggaaatgtagga

SEQ ID NO: 1074708 - DNA, 33 bp, Homo sapien
ggaaatgccttctagatagctggaaatgtagga

SEQ ID NO: 1074709 - DNA, 33 bp, Homo sapien
attgccaattttacacaacagtttcagaaaata

SEQ ID NO: 1074710 - DNA, 33 bp, Homo sapien
attgccaattttacacgacagtttcagaaaata

SEQ ID NO: 1074711 - DNA, 33 bp, Homo sapien
aaccaactgtaattccagaactgaaaaacataa

SEQ ID NO: 1074712 - DNA, 33 bp, Homo sapien
aaccaactgtaattccggaactgaaaaacataa

SEQ ID NO: 1074713 - DNA, 33 bp, Homo sapien
tagaagagaattcacaagttctggtagatttcc

SEQ ID NO: 1074714 - DNA, 33 bp, Homo sapien
tagaagagaattcacatgttctggtagatttcc

SEQ ID NO: 1074715 - DNA, 33 bp, Homo sapien
cacaaatagccaagcaacattctctaacaggtg

SEQ ID NO: 1074716 - DNA, 33 bp, Homo sapien
cacaaatagccaagcagcattctctaacaggtg

SEQ ID NO: 1074717 - DNA, 33 bp, Homo sapien
ttgactttggcttccaatacaaaatgaactggt

SEQ ID NO: 1074718 - DNA, 33 bp, Homo sapien
ttgactttggcttccagtacaaaatgaactggt

SEQ ID NO: 1074719 - DNA, 33 bp, Homo sapien
gtgttctctttcaatgaagtctgtggctttaac

SEQ ID NO: 1074720 - DNA, 33 bp, Homo sapien
gtgttctctttcaatgcagtctgtggctttaac

SEQ ID NO: 1074721 - DNA, 33 bp, Homo sapien
cagaggcaagaaatgaacttggcgaaattacag

SEQ ID NO: 1074722 - DNA, 33 bp, Homo sapien
cagaggcaagaaatgatcttggcgaaattacag

SEQ ID NO: 1074723 - DNA, 33 bp, Homo sapien
tcaggacttctccacagcagttctcaatgccag

SEQ ID NO: 1074724 - DNA, 33 bp, Homo sapien
tcaggacttctccacatcagttctcaatgccag

SEQ ID NO: 1074725 - DNA, 33 bp, Homo sapien
atccagctagaaacaaaaagatggaaattggga

SEQ ID NO: 1074726 - DNA, 33 bp, Homo sapien
atccagctagaaacaagaagatggaaattggga

SEQ ID NO: 1074727 - DNA, 33 bp, Homo sapien
ctgtggagccaacagcaaaccgactccactgct

SEQ ID NO: 1074728 - DNA, 33 bp, Homo sapien
ctgtggagccaacagcgaaccgactccactgct

SEQ ID NO: 1074729 - DNA, 33 bp, Homo sapien
gcagggagagaaagggaacacttgcaactcacc

SEQ ID NO: 1074730 - DNA, 33 bp, Homo sapien
gcagggagagaaaggggacacttgcaactcacc

SEQ ID NO: 1074731 - DNA, 33 bp, Homo sapien
atttcttggtagaaaccgtgcttaacctggtaa

SEQ ID NO: 1074732 - DNA, 33 bp, Homo sapien
atttcttggtagaaactgtgcttaacctggtaa

SEQ ID NO: 1074733 - DNA, 33 bp, Homo sapien
gtcatatcggcgatcaaaaagtttaggattttg

SEQ ID NO: 1074734 - DNA, 33 bp, Homo sapien
gtcatatcggcgatcagaaagtttaggattttg

SEQ ID NO: 1074735 - DNA, 33 bp, Homo sapien
ggtcccggctgaagacaagcacctcttagcaga

SEQ ID NO: 1074736 - DNA, 33 bp, Homo sapien
ggtcccggctgaagacgagcacctcttagcaga

SEQ ID NO: 1074737 - DNA, 33 bp, Homo sapien
tgtaaatatgtgtgaaccattgtgtaactgtgt

SEQ ID NO: 1074738 - DNA, 33 bp, Homo sapien
tgtaaatatgtgtgaatcattgtgtaactgtgt

SEQ ID NO: 1074739 - DNA, 33 bp, Homo sapien
gaggctgatttttaaccaacaactcagaggagc

SEQ ID NO: 1074740 - DNA, 33 bp, Homo sapien
gaggctgatttttaacgaacaactcagaggagc

SEQ ID NO: 1074741 - DNA, 33 bp, Homo sapien
aaaaaaaggaaaagccagaatgctatggactga

SEQ ID NO: 1074742 - DNA, 33 bp, Homo sapien
aaaaaaaggaaaagccggaatgctatggactga

SEQ ID NO: 1074743 - DNA, 33 bp, Homo sapien
tggagagggaccttacaccaggcagatgctgct

SEQ ID NO: 1074744 - DNA, 33 bp, Homo sapien
tggagagggaccttacgccaggcagatgctgct

SEQ ID NO: 1074745 - DNA, 33 bp, Homo sapien
cgcatttacagtgtcaaccagtgaaccttgagc

SEQ ID NO: 1074746 - DNA, 33 bp, Homo sapien
cgcatttacagtgtcatccagtgaaccttgagc

SEQ ID NO: 1074747 - DNA, 33 bp, Homo sapien
atttggatgaccagaaaggaccaactcggtggc

SEQ ID NO: 1074748 - DNA, 33 bp, Homo sapien
atttggatgaccagaagggaccaactcggtggc

SEQ ID NO: 1074749 - DNA, 33 bp, Homo sapien
ctgtgagcaccgacaactggaacagcctggaac

SEQ ID NO: 1074750 - DNA, 33 bp, Homo sapien
ctgtgagcaccgacaattggaacagcctggaac

SEQ ID NO: 1074751 - DNA, 33 bp, Homo sapien
gttttgttctgcacaagaattcaccaaataata

SEQ ID NO: 1074752 - DNA, 33 bp, Homo sapien
gttttgttctgcacaataattcaccaaataata

SEQ ID NO: 1074753 - DNA, 33 bp, Homo sapien
aaggtgccttcatgccgctttaacagagctgga

SEQ ID NO: 1074754 - DNA, 33 bp, Homo sapien
aaggtgccttcatgcctctttaacagagctgga

SEQ ID NO: 1074755 - DNA, 33 bp, Homo sapien
gacagggcttgtttacaccagtcactgtgttct

SEQ ID NO: 1074756 - DNA, 33 bp, Homo sapien
gacagggcttgtttacgccagtcactgtgttct

SEQ ID NO: 1074757 - DNA, 33 bp, Homo sapien
ttttctttgtgcattaaacatagtgaaacacac

SEQ ID NO: 1074758 - DNA, 33 bp, Homo sapien
ttttctttgtgcattagacatagtgaaacacac

SEQ ID NO: 1074759 - DNA, 33 bp, Homo sapien
ggctcagctctcaggacgcgtggttggagagct

SEQ ID NO: 1074760 - DNA, 33 bp, Homo sapien
ggctcagctctcaggatgcgtggttggagagct

SEQ ID NO: 1074761 - DNA, 33 bp, Homo sapien
taggaaaggttccgtaacttcagcacgtctagc

SEQ ID NO: 1074762 - DNA, 33 bp, Homo sapien
taggaaaggttccgtatcttcagcacgtctagc

SEQ ID NO: 1074763 - DNA, 33 bp, Homo sapien
cccagaacccacaatccaaaggcatatgcgtga

SEQ ID NO: 1074764 - DNA, 33 bp, Homo sapien
cccagaacccacaatctaaaggcatatgcgtga

SEQ ID NO: 1074765 - DNA, 33 bp, Homo sapien
gtccagtgtgaacaacagagaagatgggaaggg

SEQ ID NO: 1074766 - DNA, 33 bp, Homo sapien
gtccagtgtgaacaacggagaagatgggaaggg

SEQ ID NO: 1074767 - DNA, 33 bp, Homo sapien
agggatcaattttgaaagtggagccaatagggg

SEQ ID NO: 1074768 - DNA, 33 bp, Homo sapien
agggatcaattttgaaggtggagccaatagggg

SEQ ID NO: 1074769 - DNA, 33 bp, Homo sapien
tcagaccatagcaccaagtgattctcaggctca

SEQ ID NO: 1074770 - DNA, 33 bp, Homo sapien
tcagaccatagcaccaggtgattctcaggctca

SEQ ID NO: 1074771 - DNA, 33 bp, Homo sapien
tgtacatggaaaaggaagaattgtatagtatgt

SEQ ID NO: 1074772 - DNA, 33 bp, Homo sapien
tgtacatggaaaaggaggaattgtatagtatgt

SEQ ID NO: 1074773 - DNA, 33 bp, Homo sapien
cctcctgcctccttccactcttcagaaaatttc

SEQ ID NO: 1074774 - DNA, 33 bp, Homo sapien
cctcctgcctccttccgctcttcagaaaatttc

SEQ ID NO: 1074775 - DNA, 33 bp, Homo sapien
gtgggcagtgctgccacgaaggagcggaagtgg

SEQ ID NO: 1074776 - DNA, 33 bp, Homo sapien
gtgggcagtgctgccatgaaggagcggaagtgg

SEQ ID NO: 1074777 - DNA, 33 bp, Homo sapien
gggccctggcaacgacacggttattcatctatc

SEQ ID NO: 1074778 - DNA, 33 bp, Homo sapien
gggccctggcaacgacgcggttattcatctatc

SEQ ID NO: 1074779 - DNA, 33 bp, Homo sapien
cagaacagcccttccacaagccgctgagcccat

SEQ ID NO: 1074780 - DNA, 33 bp, Homo sapien
cagaacagcccttccataagccgctgagcccat

SEQ ID NO: 1074781 - DNA, 33 bp, Homo sapien
ccctgttccctttgcccgatggaggccaggtgt

SEQ ID NO: 1074782 - DNA, 33 bp, Homo sapien
ccctgttccctttgcctgatggaggccaggtgt

SEQ ID NO: 1074783 - DNA, 33 bp, Homo sapien
caaagccgggattttacgaggagaaccatcctt

SEQ ID NO: 1074784 - DNA, 33 bp, Homo sapien
caaagccgggattttaggaggagaaccatcctt

SEQ ID NO: 1074785 - DNA, 33 bp, Homo sapien
ggttctgatcatggggaaccggtagatagagag

SEQ ID NO: 1074786 - DNA, 33 bp, Homo sapien
ggttctgatcatgggggaccggtagatagagag

SEQ ID NO: 1074787 - DNA, 33 bp, Homo sapien
caaggcagctaccaagcaacctgctggaccctg

SEQ ID NO: 1074788 - DNA, 33 bp, Homo sapien
caaggcagctaccaagtaacctgctggaccctg

SEQ ID NO: 1074789 - DNA, 33 bp, Homo sapien
cactaggtgccgtgatcagagttacctgggtgg

SEQ ID NO: 1074790 - DNA, 33 bp, Homo sapien
cactaggtgccgtgattagagttacctgggtgg

SEQ ID NO: 1074791 - DNA, 33 bp, Homo sapien
tctcccccagtaccaccaagcccggcacgacca

SEQ ID NO: 1074792 - DNA, 33 bp, Homo sapien
tctcccccagtaccacgaagcccggcacgacca

SEQ ID NO: 1074793 - DNA, 33 bp, Homo sapien
acgggctgacagtgacaatgtaatcaaagcacc

SEQ ID NO: 1074794 - DNA, 33 bp, Homo sapien
acgggctgacagtgaccatgtaatcaaagcacc

SEQ ID NO: 1074795 - DNA, 33 bp, Homo sapien
cttgttccagctctccaccctgcttgctggcag

SEQ ID NO: 1074796 - DNA, 33 bp, Homo sapien
cttgttccagctctccgccctgcttgctggcag

SEQ ID NO: 1074797 - DNA, 33 bp, Homo sapien
gatgccttacacttcagggttcttgagcgtcca

SEQ ID NO: 1074798 - DNA, 33 bp, Homo sapien
gatgccttacacttcatggttcttgagcgtcca

SEQ ID NO: 1074799 - DNA, 33 bp, Homo sapien
gagccttagtaagacaaccaacacagttcttag

SEQ ID NO: 1074800 - DNA, 33 bp, Homo sapien
gagccttagtaagacatccaacacagttcttag

SEQ ID NO: 1074801 - DNA, 33 bp, Homo sapien
tagtgatttaggagtaccatagcagctcaaggg

SEQ ID NO: 1074802 - DNA, 33 bp, Homo sapien
tagtgatttaggagtatcatagcagctcaaggg

SEQ ID NO: 1074803 - DNA, 33 bp, Homo sapien
gtgttttgccaacagaggtactgcttaaagtac

SEQ ID NO: 1074804 - DNA, 33 bp, Homo sapien
gtgttttgccaacagatgtactgcttaaagtac

SEQ ID NO: 1074805 - DNA, 33 bp, Homo sapien
aaacagatgataaaagaaaagtatcaggcaggg

SEQ ID NO: 1074806 - DNA, 33 bp, Homo sapien
aaacagatgataaaagtaaagtatcaggcaggg

SEQ ID NO: 1074807 - DNA, 33 bp, Homo sapien
catgttcaagagaatacgcaacatcaaaatacc

SEQ ID NO: 1074808 - DNA, 33 bp, Homo sapien
catgttcaagagaatatgcaacatcaaaatacc

SEQ ID NO: 1074809 - DNA, 33 bp, Homo sapien
agtcagaactactacaaataaagctgctatgaa

SEQ ID NO: 1074810 - DNA, 33 bp, Homo sapien
agtcagaactactacacataaagctgctatgaa

SEQ ID NO: 1074811 - DNA, 33 bp, Homo sapien
agccaatgccgagagaaagagcagatgccatta

SEQ ID NO: 1074812 - DNA, 33 bp, Homo sapien
agccaatgccgagagagagagcagatgccatta

SEQ ID NO: 1074813 - DNA, 33 bp, Homo sapien
acaggcgtgcaagaacacaatgtaaatgagttg

SEQ ID NO: 1074814 - DNA, 33 bp, Homo sapien
acaggcgtgcaagaacgcaatgtaaatgagttg

SEQ ID NO: 1074815 - DNA, 33 bp, Homo sapien
tttattcctggccttacatctgtaaaatctgaa

SEQ ID NO: 1074816 - DNA, 33 bp, Homo sapien
tttattcctggccttagatctgtaaaatctgaa

SEQ ID NO: 1074817 - DNA, 33 bp, Homo sapien
tcacttattttctccacagacgtttctgctttt

SEQ ID NO: 1074818 - DNA, 33 bp, Homo sapien
tcacttattttctccatagacgtttctgctttt

SEQ ID NO: 1074819 - DNA, 33 bp, Homo sapien
gcttaagaaccattgccgatagtacagaaaggg

SEQ ID NO: 1074820 - DNA, 33 bp, Homo sapien
gcttaagaaccattgctgatagtacagaaaggg

SEQ ID NO: 1074821 - DNA, 33 bp, Homo sapien
gctttggaggcaacaaactatgaaagaagccca

SEQ ID NO: 1074822 - DNA, 33 bp, Homo sapien
gctttggaggcaacaatctatgaaagaagccca

SEQ ID NO: 1074823 - DNA, 33 bp, Homo sapien
ccgaactagggatgaaggaaggtgttagctggc

SEQ ID NO: 1074824 - DNA, 33 bp, Homo sapien
ccgaactagggatgaatgaaggtgttagctggc

SEQ ID NO: 1074825 - DNA, 33 bp, Homo sapien
acattttctttactcacgaaggaaatacattga

SEQ ID NO: 1074826 - DNA, 33 bp, Homo sapien
acattttctttactcatgaaggaaatacattga

SEQ ID NO: 1074827 - DNA, 33 bp, Homo sapien
cacacacagtcagcgtcaagtacaagggccagc

SEQ ID NO: 1074828 - DNA, 33 bp, Homo sapien
cacacacagtcagcgtgaagtacaagggccagc

SEQ ID NO: 1074829 - DNA, 33 bp, Homo sapien
gacaactgcgcttactcaccacaccgaagggaa

SEQ ID NO: 1074830 - DNA, 33 bp, Homo sapien
gacaactgcgcttacttaccacaccgaagggaa

SEQ ID NO: 1074831 - DNA, 33 bp, Homo sapien
ataattaggcaccaacactgctgaaagacctgg

SEQ ID NO: 1074832 - DNA, 33 bp, Homo sapien
ataattaggcaccaacgctgctgaaagacctgg

SEQ ID NO: 1074833 - DNA, 33 bp, Homo sapien
accaaagtgattagcaaaagaatcaagttcatg

SEQ ID NO: 1074834 - DNA, 33 bp, Homo sapien
accaaagtgattagcataagaatcaagttcatg

SEQ ID NO: 1074835 - DNA, 33 bp, Homo sapien
cccatctctgggtcacacttggccacggcttca

SEQ ID NO: 1074836 - DNA, 33 bp, Homo sapien
cccatctctgggtcacgcttggccacggcttca

SEQ ID NO: 1074837 - DNA, 33 bp, Homo sapien
gcacatctgagcaacaatggaaatttggagaga

SEQ ID NO: 1074838 - DNA, 33 bp, Homo sapien
gcacatctgagcaacagtggaaatttggagaga

SEQ ID NO: 1074839 - DNA, 33 bp, Homo sapien
actcgggctgcaggaaactgactcaacaactcc

SEQ ID NO: 1074840 - DNA, 33 bp, Homo sapien
actcgggctgcaggaagctgactcaacaactcc

SEQ ID NO: 1074841 - DNA, 33 bp, Homo sapien
ctgcagcccgagtgtgcaatcttctctgccaga

SEQ ID NO: 1074842 - DNA, 33 bp, Homo sapien
ctgcagcccgagtgtggaatcttctctgccaga

SEQ ID NO: 1074843 - DNA, 33 bp, Homo sapien
gctgtaactgcatccaaacaactttgaccaggt

SEQ ID NO: 1074844 - DNA, 33 bp, Homo sapien
gctgtaactgcatccagacaactttgaccaggt

SEQ ID NO: 1074845 - DNA, 33 bp, Homo sapien
aactgactggacggaaagtgagatgacagagtg

SEQ ID NO: 1074846 - DNA, 33 bp, Homo sapien
aactgactggacggaaggtgagatgacagagtg

SEQ ID NO: 1074847 - DNA, 33 bp, Homo sapien
ctgtgttgcccatctcactatgatcggtctttt

SEQ ID NO: 1074848 - DNA, 33 bp, Homo sapien
ctgtgttgcccatctcgctatgatcggtctttt

SEQ ID NO: 1074849 - DNA, 33 bp, Homo sapien
aagtacgggccctaccggagccagcaaatgcac

SEQ ID NO: 1074850 - DNA, 33 bp, Homo sapien
aagtacgggccctacctgagccagcaaatgcac

SEQ ID NO: 1074851 - DNA, 33 bp, Homo sapien
tgtttcttcatgctataaatacgtttctggaaa

SEQ ID NO: 1074852 - DNA, 33 bp, Homo sapien
tgtttcttcatgctatgaatacgtttctggaaa

SEQ ID NO: 1074853 - DNA, 33 bp, Homo sapien
aatatcgttccaaaaacctgatatgagactgga

SEQ ID NO: 1074854 - DNA, 33 bp, Homo sapien
aatatcgttccaaaaatctgatatgagactgga

SEQ ID NO: 1074855 - DNA, 33 bp, Homo sapien
atgaagcctgttccaacgaacggtctgagtttg

SEQ ID NO: 1074856 - DNA, 33 bp, Homo sapien
atgaagcctgttccaatgaacggtctgagtttg

SEQ ID NO: 1074857 - DNA, 33 bp, Homo sapien
ggcttggcatcttgaactgtttttctgcagtaa

SEQ ID NO: 1074858 - DNA, 33 bp, Homo sapien
ggcttggcatcttgaattgtttttctgcagtaa

SEQ ID NO: 1074859 - DNA, 33 bp, Homo sapien
ttatgcaaaaacagaaatgaggtgttcttggag

SEQ ID NO: 1074860 - DNA, 33 bp, Homo sapien
ttatgcaaaaacagaagtgaggtgttcttggag

SEQ ID NO: 1074861 - DNA, 33 bp, Homo sapien
gtaagaggagcaagtcgagagatccaatgtaca

SEQ ID NO: 1074862 - DNA, 33 bp, Homo sapien
gtaagaggagcaagtctagagatccaatgtaca

SEQ ID NO: 1074863 - DNA, 33 bp, Homo sapien
tttctgagtagtgaagaccacttgaagctggag

SEQ ID NO: 1074864 - DNA, 33 bp, Homo sapien
tttctgagtagtgaaggccacttgaagctggag

SEQ ID NO: 1074865 - DNA, 33 bp, Homo sapien
atcccacatcaaaaaaaaatcacctaacagata

SEQ ID NO: 1074866 - DNA, 33 bp, Homo sapien
atcccacatcaaaaaagaatcacctaacagata

SEQ ID NO: 1074867 - DNA, 33 bp, Homo sapien
ggacttccagaagacaatgaaagtcacaggagt

SEQ ID NO: 1074868 - DNA, 33 bp, Homo sapien
ggacttccagaagacagtgaaagtcacaggagt

SEQ ID NO: 1074869 - DNA, 33 bp, Homo sapien
tccacatttggtatgagattagccgtagtttgt

SEQ ID NO: 1074870 - DNA, 33 bp, Homo sapien
tccacatttggtatgatattagccgtagtttgt

SEQ ID NO: 1074871 - DNA, 33 bp, Homo sapien
ttatacatattagtgaagtttacatatgaaatc

SEQ ID NO: 1074872 - DNA, 33 bp, Homo sapien
ttatacatattagtgaggtttacatatgaaatc

SEQ ID NO: 1074873 - DNA, 33 bp, Homo sapien
caatgttgaactacgaatacatgtaactcttta

SEQ ID NO: 1074874 - DNA, 33 bp, Homo sapien
caatgttgaactacgattacatgtaactcttta

SEQ ID NO: 1074875 - DNA, 33 bp, Homo sapien
tcctattggttgacaacttggaagccttgagtg

SEQ ID NO: 1074876 - DNA, 33 bp, Homo sapien
tcctattggttgacaagttggaagccttgagtg

SEQ ID NO: 1074877 - DNA, 33 bp, Homo sapien
tttctttgaaaagtaaacgcctataacactcaa

SEQ ID NO: 1074878 - DNA, 33 bp, Homo sapien
tttctttgaaaagtaaccgcctataacactcaa

SEQ ID NO: 1074879 - DNA, 33 bp, Homo sapien
agctgtcctcatcctacatatcagcgactggtg

SEQ ID NO: 1074880 - DNA, 33 bp, Homo sapien
agctgtcctcatcctatatatcagcgactggtg

SEQ ID NO: 1074881 - DNA, 33 bp, Homo sapien
ctgcctgacttggaaacgaggtagagcctactt

SEQ ID NO: 1074882 - DNA, 33 bp, Homo sapien
ctgcctgacttggaaatgaggtagagcctactt

SEQ ID NO: 1074883 - DNA, 33 bp, Homo sapien
tattgaagcttgagaacaagaaagtatagcaag

SEQ ID NO: 1074884 - DNA, 33 bp, Homo sapien
tattgaagcttgagaataagaaagtatagcaag

SEQ ID NO: 1074885 - DNA, 33 bp, Homo sapien
tcgggtaaaaagtagaccctagcattgacttga

SEQ ID NO: 1074886 - DNA, 33 bp, Homo sapien
tcgggtaaaaagtagatcctagcattgacttga

SEQ ID NO: 1074887 - DNA, 33 bp, Homo sapien
ttattattaaacttaaatatcagttctctggta

SEQ ID NO: 1074888 - DNA, 33 bp, Homo sapien
ttattattaaacttaagtatcagttctctggta

SEQ ID NO: 1074889 - DNA, 33 bp, Homo sapien
ataagcaaacttgagcaatctatggcatccaga

SEQ ID NO: 1074890 - DNA, 33 bp, Homo sapien
ataagcaaacttgagcgatctatggcatccaga

SEQ ID NO: 1074891 - DNA, 33 bp, Homo sapien
acagaagaacagttacaaaagacagagtaaaag

SEQ ID NO: 1074892 - DNA, 33 bp, Homo sapien
acagaagaacagttacgaaagacagagtaaaag

SEQ ID NO: 1074893 - DNA, 33 bp, Homo sapien
gggggagctaacaatcagaactgagaactcaaa

SEQ ID NO: 1074894 - DNA, 33 bp, Homo sapien
gggggagctaacaatcggaactgagaactcaaa

SEQ ID NO: 1074895 - DNA, 33 bp, Homo sapien
tgtatacaagtctatacgtgcaaaaatatttac

SEQ ID NO: 1074896 - DNA, 33 bp, Homo sapien
tgtatacaagtctatatgtgcaaaaatatttac

SEQ ID NO: 1074897 - DNA, 33 bp, Homo sapien
taccaataataaatcaatcgccagattcacatc

SEQ ID NO: 1074898 - DNA, 33 bp, Homo sapien
taccaataataaatcagtcgccagattcacatc

SEQ ID NO: 1074899 - DNA, 33 bp, Homo sapien
tccatctccattgataccacgtttgtccaggcc

SEQ ID NO: 1074900 - DNA, 33 bp, Homo sapien
tccatctccattgatatcacgtttgtccaggcc

SEQ ID NO: 1074901 - DNA, 33 bp, Homo sapien
ttattgaaaggaaccacgtacagcaatgcggag

SEQ ID NO: 1074902 - DNA, 33 bp, Homo sapien
ttattgaaaggaaccatgtacagcaatgcggag

SEQ ID NO: 1074903 - DNA, 33 bp, Homo sapien
aagcaatgaggtaacacattcagagtgatcaaa

SEQ ID NO: 1074904 - DNA, 33 bp, Homo sapien
aagcaatgaggtaacatattcagagtgatcaaa

SEQ ID NO: 1074905 - DNA, 33 bp, Homo sapien
agagccaaagagcaaaagagcatgagcccttca

SEQ ID NO: 1074906 - DNA, 33 bp, Homo sapien
agagccaaagagcaaaggagcatgagcccttca

SEQ ID NO: 1074907 - DNA, 33 bp, Homo sapien
tgtgctctttgaaaggaaatgtataaagttggt

SEQ ID NO: 1074908 - DNA, 33 bp, Homo sapien
tgtgctctttgaaagggaatgtataaagttggt

SEQ ID NO: 1074909 - DNA, 33 bp, Homo sapien
gtagtgactcagttaacgtctctgaacattggt

SEQ ID NO: 1074910 - DNA, 33 bp, Homo sapien
gtagtgactcagttaatgtctctgaacattggt

SEQ ID NO: 1074911 - DNA, 33 bp, Homo sapien
gaaaacatgaattacacgctagaagagtaagaa

SEQ ID NO: 1074912 - DNA, 33 bp, Homo sapien
gaaaacatgaattacatgctagaagagtaagaa

SEQ ID NO: 1074913 - DNA, 33 bp, Homo sapien
ttttacgtttaagtccacaatctactatgattt

SEQ ID NO: 1074914 - DNA, 33 bp, Homo sapien
ttttacgtttaagtccgcaatctactatgattt

SEQ ID NO: 1074915 - DNA, 33 bp, Homo sapien
accttaatttacattacgatggctttagactct

SEQ ID NO: 1074916 - DNA, 33 bp, Homo sapien
accttaatttacattatgatggctttagactct

SEQ ID NO: 1074917 - DNA, 33 bp, Homo sapien
acaatggattggaatacggatggactgaaggca

SEQ ID NO: 1074918 - DNA, 33 bp, Homo sapien
acaatggattggaatatggatggactgaaggca

SEQ ID NO: 1074919 - DNA, 33 bp, Homo sapien
cctaaagcctccataaaggttgtagagagccac

SEQ ID NO: 1074920 - DNA, 33 bp, Homo sapien
cctaaagcctccataatggttgtagagagccac

SEQ ID NO: 1074921 - DNA, 33 bp, Homo sapien
tcagctctgaaatttaactgccatgtgatcctg

SEQ ID NO: 1074922 - DNA, 33 bp, Homo sapien
tcagctctgaaatttatctgccatgtgatcctg

SEQ ID NO: 1074923 - DNA, 33 bp, Homo sapien
gaatccagtaataggccgacatatattatggtc

SEQ ID NO: 1074924 - DNA, 33 bp, Homo sapien
gaatccagtaataggctgacatatattatggtc

SEQ ID NO: 1074925 - DNA, 33 bp, Homo sapien
aaatctacataattaacaaaagtgcattatcac

SEQ ID NO: 1074926 - DNA, 33 bp, Homo sapien
aaatctacataattaagaaaagtgcattatcac

SEQ ID NO: 1074927 - DNA, 33 bp, Homo sapien
aataccagttcagccacagtaggatagtgcacc

SEQ ID NO: 1074928 - DNA, 33 bp, Homo sapien
aataccagttcagccatagtaggatagtgcacc

SEQ ID NO: 1074929 - DNA, 33 bp, Homo sapien
gatataaaccaaaaaccagctggcgtacaaaga

SEQ ID NO: 1074930 - DNA, 33 bp, Homo sapien
gatataaaccaaaaactagctggcgtacaaaga

SEQ ID NO: 1074931 - DNA, 27 bp, Homo sapien
attatgagcacgacagacgcctgatct

SEQ ID NO: 1074932 - DNA, 26 bp, Homo sapien
agatcaggcgtctgtcgtgctcataa

SEQ ID NO: 1074933 - DNA, 30 bp, Homo sapien
cwwgagatcaggcgtctgtcgtgctcataa

SEQ ID NO: 1074934 - DNA, 31 bp, Homo sapien
attatgagcacgacagacgcctgatctcatg
